(19) United States
(12) Patent Application Publication
(10) Pub. No.: US 2003/0203372 A1
(43) Pub. Date: Oct. 30, 2003

(54) Analysis method

(76) Inventors: Neil Raymond Ward, Oxford (GB); Christopher Robert Mundy, Oxford (GB); On Kan, Oxford (GB); Robert Alan Harris, Oxford (GB); Jonathan White, Oxford (GB); Katie Mary Binley, Oxford (GB); William Nigel Rayner, Oxford (GB); Stuart Naylor, Oxford (GB); Susan Mary Kingsman, Oxford (GB); David Krige, Oxford (GB)

Correspondence Address: Bruce D. Grant, Morrison & Foerster LLP, Suite 500, 3811 Valley Centre Drive, San Diego, CA, 92130, US

(21) Appl. No.: 10/170,385

(22) Filed: Jun. 12, 2002

Related U.S. Application Data
(63) Continuation-in-part of application No. PCT/GB02/01662, filed on Apr. 8, 2002.
(63) Continuation-in-part of application No. PCT/GB01/05458, filed on Dec. 10, 2001.

(30) Foreign Application Priority Data
Apr. 10, 2001 (GB) GB 0109008.3
Dec. 8, 2000 (GB) GB 0030076.4
Feb. 8, 2001 (GB) GB 0103156.6
Oct. 25, 2001 (GB) GB 0125666.8

(51) Int. Cl. C12Q 1/68

(52) U.S. Cl. 435/6

(57) ABSTRACT

This invention relates to novel methods for the identification of genes and gene products that are implicated in certain disease states. According to the invention, there is provided a method for the identification of a gene that is implicated in a specific disease or physiological condition, said method comprising the steps of comparing: i) the transcriptome or proteome of a first specialized cell type that is implicated in the disease or condition under first and second experimental conditions; with ii) the transcriptome or proteome of a second specialized cell type under said first and said second experimental conditions; and identifying as a gene implicated in the disease or physiological condition, a gene that is differentially regulated in the two specialized cell types under the first and second experimental conditions. The invention also relates to novel genes and gene products identified using these methods.

### CROSS-REFERENCE TO RELATED APPLICATIONS

[0001] This application is a continuation-in-part of International patent application PCT/GB02/01662 (filed on Apr. 8, 2002), which is a continuation-in-part of United Kingdom patent application GB 0109008.3 (filed on Apr. 10, 2001), and is a continuation-in-part of International patent application PCT/GB01/05458 (filed on Dec. 10, 2001), the latter being a continuation in part of United Kingdom patent applications GB 0030076.4 (filed on Dec. 8, 2000), GB 0103156.6 (filed on Feb. 8, 2001) and GB 0125666.8 (filed on Oct. 25, 2001). Each of these applications is incorporated by reference in its entirety.

### BACKGROUND OF THE INVENTION

[0002] This invention relates to novel methods for the identification of genes and gene products that are implicated in certain disease states. The invention also relates to novel genes and gene products identified using these methods. All publications, patents and patent applications cited herein are incorporated in full by reference.

[0003] One of the central goals in the field of gene expression is to understand and elucidate the relationship between a particular disease state and the gene expression pattern that defines and/or causes this disease state. Research has concentrated on differences in expression patterns between diseased and healthy tissues to elucidate the physiological mechanisms of disease. Identified differences in expression patterns provide putative points for therapeutic intervention to reverse the disease phenotype. These differences also provide markers that are useful for diagnosis, and identify proteins for further investigation as agents implicated in the disease in question.

[0004] Conventional methods for the elucidation of mechanisms of disease tend to concentrate on the correlation of a disease state with altered levels of a particular protein. Such methods include techniques of immunohistochemistry, the study of differential mRNA expression and the sequence analysis of particular proteins to identify mutations that are associated with a certain disease state.

[0005] Recently, research has concentrated on analysis of the transcriptomes of organisms and cell types that are considered to be of scientific interest. By “transcriptome” is meant the exact set of transcripts that are expressed in a cell. The emerging field of nucleic acid arrays is one field in which a large number of powerful tools are being generated for the study of transcriptome variation between different tissue types. These tools are based on techniques originally pioneered by Schena et al., 1995 (Science 270: 467-470) and Fodor et al., 1991 (Science 251, 767-773) and facilitate the evaluation of variations in DNA or RNA sequences and of variations in expression levels from tissue samples and allow the identification and genotyping of mutations and polymorphisms in these sequences. The power of one such technique has recently been demonstrated by Perou et al., (Nature, 2000, 406:747-752), who generated molecular portraits of the transcriptomes of human breast tumours.

[0006] Over recent years, the so-called “genomics revolution” has allowed access to large portions of whole genomes, including the human genome. The amount of sequence information now available considerably facilitates the analysis of the results of experiments that aim to elucidate the differences between gene expression in diseased and healthy tissues. As this information increases in scope and becomes more readily available, the study of the molecular mechanism of disease, and the elucidation of techniques for combatting these diseases will be considerably facilitated.

[0007] However, there are notable disadvantages associated with all methods that are currently employed for the analysis of human disease. Many methods currently employed utilize established cell lines. Because these cells have been manipulated to allow their immortalization in cell culture, the physiological situation in these cells is not considered by the present inventors to be generally representative of the authentic situation in equivalent cells in vivo. Furthermore, most of these methods tend to utilize a global strategy for intervention, often ignoring the intricacies in gene expression that exist between different tissues. There thus remains a great need for the establishment of novel methods for the analysis of gene expression.

### BRIEF SUMMARY OF THE INVENTION

[0008] According to the invention, there is provided a method for the identification of a gene that is implicated in a specific disease or physiological condition, said method comprising the steps of:

[0009] a) comparing:

[0010] i) the transcriptome or proteome of a first specialized cell type that is implicated in the disease or condition under first and second experimental conditions; with

[0011] ii) the transcriptome or proteome of a second specialized cell type under said first and said second experimental conditions; and

[0012] b) identifying as a gene implicated in the disease or physiological condition, a gene that is differentially regulated in the two specialized cell types under the first and second experimental conditions.

[0013] Using this method, genes have been identified that respond to perturbations of cell physiology in a cell-specific rather than a generic fashion. The method of the invention exhibits significant advantages over conventional methods of identifying genes that are implicated in disease.

[0014] Various groups have previously investigated mechanisms of physiological regulation, by comparing gene expression levels in the presence and absence of a physiological stimulus or challenge. Genes identified in a particular cell type as being expressed at different levels under different conditions are implicated as components of a pathway that is responsive to the altered conditions, or that is regulated differently under the altered conditions. However, these methods exhibit a tendency to ignore patterns of gene expression that are physiologically relevant. This inclination is considered to result from a prejudice in the art that dictates that cells respond to changes in certain physiological conditions in a generic fashion, rather than in a cell specific fashion.

[0015] By “implicated in a specific disease or physiological condition” is meant that the gene has been found to possess a distinct role in a pathway that is involved in susceptibility to, generation of or maintenance of a particular disease phenotype or physiological condition. As will be apparent to the skilled reader, any point in any pathway may be the unique point at which a cell departs from the normal physiological response and generates a disease phenotype. Often the effect that is manifested as a disease is the result of a mutation event, in which a mutation occurs in the sequence of a gene encoding a protein that functions in a relevant physiological pathway.

[0016] There are numerous examples of diseases and conditions that may be studied using the method of the invention. Such pathological conditions include those that result from a change in the intrinsic nature of a cell (usually genetic) or from a change in the cellular microenvironment, either of which might be recapitulated in a laboratory setting. The methods may be applied to any disease or condition that is manifested in, or is generated in a specific cell type.

[0017] Examples of such conditions include changes in the cellular microenvironment, exposure to hormones, growth factors, cytokines, chemokines, inflammatory agents, toxins, metabolites, pH, pharmaceutical agents, hypoxia, anoxia, ischemia, imbalance of any plasma-borne nutrient [including glucose, amino acids, co-factors, mineral salts, proteins and lipids], osmotic stress, temperature [hypo and hyper-thermia], mechanical stress, irradiation [ionising or non-ionising], cell-extracellular matrix interactions, cell-cell interactions, accumulations of foreign or pathological extracellular components, intracellular and extracellular pathogens [including bacteria, viruses, fungi and mycoplasma] and genetic perturbations [both epigenetic or mediated by mutation or polymorphism].

[0018] Examples of such diseases include cardiovascular disease, atherosclerosis, inflammatory conditions (including rheumatoid arthritis), cancer, ischemic disease, asthma, hematopoietic disorders, neurological diseases including Parkinson's and Alzheimer's diseases, infectious disease and allergies.

[0019] One particular physiological response that has been used herein to illustrate the invention is the cellular response to hypoxia. The term “hypoxia” is intended to refer to an environment of reduced oxygen tension, as compared to the normal physiological environment for a particular organism, which is termed “normoxia”. The prejudice in this technical field presents the view that there is a general, ubiquitous response to hypoxia, mediated primarily at the level of mRNA (transcriptional initiation and post-transcriptional stabilisation).

[0020] In a variety of human diseases, cells are exposed to conditions of low oxygen tension, usually as a result of poor oxygen supply to the diseased area. For instance, tissue oxygenation plays a significant regulatory role in both apoptosis and in angiogenesis (Bouck et al, 1996, Adv. Cancer Res. 69:135-174; Bunn et al, 1996, Physiol. Rev. 76:839-885; Dor et al, 1997, Trends Cardiovasc. Med., 7:289-294; Carmeliet et al, 1998, Nature 394:485-490). Apoptosis (see Duke et al, 1996, Sci. American, 80-87 for review) and growth arrest occur when cell growth and viability are reduced due to oxygen deprivation. Angiogenesis (i.e. blood vessel growth, vascularization), is stimulated when hypooxygenated cells secrete factors that stimulate proliferation and migration of endothelial cells in an attempt to restore oxygen homeostasis (for review see Hanahan et al, 1996, Cell, 86:353-364).

[0021] Ischaemic disease pathologies involve a decrease in the blood supply to a bodily organ, tissue or body part generally caused by constriction or obstruction of the blood vessels. For example, solid tumours typically have a disorganised blood supply, leading to hypoxic regions. Other disease conditions involving hypoxia include stroke, atherosclerosis, retinopathy, acute renal failure, myocardial infarction, stroke and hair loss. Therefore, apoptosis and angiogenesis as induced by the ischaemic condition are also considered to be involved in these disease states. It is generally considered that understanding the mechanism by which cells respond to these diseases may be the key to the disease pathology and thus relevant to disease treatment.

[0022] In a different but related approach, it is now recognised that angiogenesis is necessary for tumour growth and that retardation of this process provide a useful tool in controlling malignancy and retinopathies. For example, neoangiogenesis is seen in many forms of retinopathy and in tumour growth. The ability to be able to induce tumourigenic cells to undergo apoptosis is an extremely desirable goal; particularly in the cancer field, it has been observed that apoptosis and angiogenesis-related genes provide potent therapeutic targets. It has also been observed that hypoxia plays a critical role in the selection of mutations that contribute to more severe tumourigenic phenotypes (Graeber et al., 1996 Nature, 379(6560):88-91).

[0023] Early in the history of this field it was discovered that a transcription factor, HIF-1alpha, is ubiquitously present in cells and is responsible for the induction of a number of genes in response to hypoxia. This protein is considered a master regulator of oxygen homeostasis (see, for example, Semenza, (1998) Curr. Op. Genetics and Dev. 8:588-594). Where HIF1alpha is genetically knocked out, the hypoxia-inducible transcription of virtually all glycolytic enzymes has been shown to be inhibited. Glycolysis is an essential process which goes on in all mammalian cells. This finding is therefore consistent with previous work showing that when cells are exposed to conditions of hypoxia, they up-regulate glycolytic enzymes to enable ATP production, since oxidative phosphorylation is no longer feasible under conditions of low oxygen (Webster (1987) Mol.Cell.Biochem, 77: 19-28). Further support for a critical and general role of HIF1alpha in the hypoxic response is demonstrated by the knockout mouse, which dies at day 10.5 of gestation. The same is true of the knockout of the ARNT protein, the dimerisation partner of HIF1alpha.

[0024] For the first time, it is demonstrated herein that different tissues and cell types exhibit a very different response to hypoxia, at the level of the induction and repression of gene expression. This has allowed the detailed elucidation of the mechanism of this particular physiological response, so paving the way for the development of improved therapeutic agents that target components of the response pathway in particular tissues. Although conventional approaches to the analysis of this mechanism have successfully identified numerous genes, because of the universal prejudice in the art that these components will all be induced/repressed similarly in all cell types, all the approaches suggested have hitherto been limited to the design of therapeutic agents that act in a global fashion.

[0025] The methods of the present invention therefore extend and add to previous work performed in this field, in that the discoveries made now allow the design of agents that target the hypoxic response in specific tissues. For example, it is known that brain and heart tissues die very rapidly after ischaemic insult. By using the method of the invention, it is quite possible that these tissues will be found to share common features in their response to hypoxia, that is different from other cell types. This might allow, for example, the design of a combination cardioprotective and neuroprotective agent effective against this subset of body tissues. Alternatively, the hypoxic response in these tissues might be found to be quite different. This information would then be taken into account when designing therapeutic countermeasures, in that an agent would be designed for the unique neurological or cardiological tissue concerned.

[0026] The method of the invention involves the comparison of the transcriptomes or proteomes of at least two specialized cell types under two different physiological or genetic conditions. By “transcriptome” is meant the exact set of transcripts that are expressed in a cell. The transcriptome thus has a qualitative element (the identity of individual gene transcripts) and a quantitative element (the proportion of each unique transcript in the total number of individual transcripts present in the cell at a particular moment). By “proteome” is meant the exact set of protein molecules that are expressed in a cell.

[0027] By “specialized cell type” is meant a cell type that has a restricted biochemical capacity and that can be unambiguously identified as possessing a unique set of biochemical and physiological functions. Preferably, the specialized cells are primary cells, and not cell lines or whole body tissues. Primary cells are cells that cannot proliferate indefinitely in culture. Primary cells can be derived from adult tissue, or from embryo tissue that is differentiated in culture to an adult cell or to a precursor of an adult cell that displays specialized characteriztics.

[0028] Examples of preferred specialized cell types include cardiomyocytes, endothelial cells, sensory neurons, motor neurons, CNS neurons (all types), astrocytes, glial cells, schwann cells, mast cells, eosinophils, smooth muscle cells, skeletal muscle cells, pericytes, lymphocytes, tumor cells, monocytes, macrophages, foamy macrophages, granulocytes, synovial cells/synovial fibroblasts, epithelial cells (varieties from all tissues/organs). Examples of other suitable specialized cell types include vascular endothelial cells, smooth muscle cells (aortic, bronchial, coronary artery, pulmonary artery, etc), skeletal muscle cells, cardiomyocyte cells, fibroblasts (many types, such as synovial), keratinocytes, hepatocytes, dendritic cells, astrocytes, neuron cells (including mesencephalic, hippocampal, striatal, thalamic, hypothalamic, olfactory bulb, substantia nigra, locus coeruleus, cortex, dorsal root ganglia, superior cervical ganglia, sensory, motor, cerebellar cells), neutrophils, eosinophils, basophils, mast cells, monocytes, macrophage cells, erythrocytes, megakaryocytes, hematopoietic progenitor cells, hematopoietic pluripotent stem cells, any stem cells, any progenitor cells, epithelial cells, melanocytes, osteoblasts, osteoclasts, stromal cells, purkinje cells, T-cells, B-cells, synovial cells, pancreatic islet cells (alpha and beta), leukemia cells, lymphoma cells, tumour cells, retinal cells, adrenal chromaffin cells. As will be apparent to the skilled reader, it is not here possible to provide an exhaustive list of specialized cell types that may be studied according to the methods of the present invention.

[0029] Intended as being included within the method of the invention is the possibility of using, as two different specialized cell types, two different physiological states of the same cell type, for example, activated and resting macrophages.

[0030] The transcriptomes of the specialized cell types are compared under different experimental conditions. The term “experimental conditions” is used broadly in this context and is intended to embrace any physiological or genetic conditions to which a cell type may be exposed. The intention of the method is to compare the transcriptomes or proteomes of the cell types under different experimental conditions that have a physiological relevance. Accordingly, the state of the transcriptome or proteome under one set of experimental conditions will generally act as a control against which the transcriptome or proteome may be compared under a second set of experimental conditions. Any distinct physiologically-relevant conditions may therefore be of interest.

[0031] Examples of suitable physiological experimental conditions include conditions under which the cell is submitted to a physiological, mechanical, temperature, chemical, toxic or pharmaceutical stress. One example is hypoxia, defined herein as a physiological state in which oxygen demand by the cell exceeds its supply to the cell. The transcriptome or proteome under this set of experimental conditions may be compared to the transcriptome or proteome under conditions of normoxia, when oxygen supply is in concordance with the demand by the cell.

[0032] The transcriptomes or proteomes may also be compared under different genetic conditions. By “genetic conditions” is meant that the genotype of the compared cell populations contains a different genetic component. This may be the presence of one or more different, non-endogenous nucleic acid molecules in the cell, herein referred to collectively as “genetic elements”. Such genetic element(s) may potentially be incorporated into the genome of the cell, or alternatively may exist as a separate genetic entity, for example, as an extra-chromosomal element such as a plasmid or episome. Alternatively, the genome may have been perturbed by external intervention, for example, to increase or decrease the expression of a particular gene or genes. A number of variations on this theme are possible, including the overexpression of a genetic element via the administration of the functional gene, the overexpression of a genetic element via the administration of a regulator of the functional gene (such as, for example, a transcription factor [either natural or artificially constructed via the fusion of a DNA binding domain with an activator domain]), the inhibition of the expression of a functional gene (for example, using antisense RNA or ribozymes), the inhibition of the expression of a functional gene (for example, using a transdominant protein) and the inhibition of the expression of a functional gene (for example, using a repressor protein that is either natural or artificially constructed from a DNA binding protein fused to a repressor domain).

[0033] A particular example of a genetic perturbation as envisaged herein, that forms one preferred embodiment of the method of the present invention, is the so-called “Smartomics” technology that forms the basis for co-pending, co-owned International patent application PCT/GB01/00758. According to this technology, a heterologous nucleic acid is introduced into a primary cell to augment a specific natural physiological response. “Smartomics” may be applied to the current invention by measuring and comparing cellular responses to a heterologous gene in two or more distinct cell types, both with and without the natural physiological stimulus. Lentivirus technology is used to introduce the heterologous nucleic acid molecule in such a way that there is negligible perturbation of endogenous gene expression. For this reason, this technology exhibits significant benefits over conventional technology of a similar nature, since the prior art methods are generally invasive, having downstream effects other than the simple introduction of the heterologous nucleic acid molecule. The Smartomics technology allows much more precise measurements to be taken of the effect of introducing the heterologous nucleic acid.

[0034] The method of the invention allows the identification of genes that are implicated in a specific disease or physiological condition. The genes identified in this way are candidate targets for antagonists or agonists that modulate disease states pertinent to that specialized cell type. This allows the development of selective agonists and antagonists, rather than broad spectrum agonists and antagonists. This approach thus adds value in the selective treatment of disease. Furthermore the identified genes are associated with regulatory elements that provide alternative and additional candidate targets for exploitation for the delivery of gene products to that cell in a cell-specific fashion. The genes and regulatory elements identified according to the method of the invention can be used directly in therapeutic applications via gene therapy, via recombinant protein methods or via chemical mimetics or as targets for the development of agonists and antagonists such as antibodies, intrabodies, small chemical molecules, peptides, regulatory nucleic acids.

[0035] The step of comparison of the transcriptomes or proteomes of the first and second specialized cell types under first and second experimental conditions may be effected using any approach that allows the quantitative comparison of gene or protein expression, and a number of such means will be known to those of skill in the art. Such experiments have only become possible in recent years, due to certain advances in technology that have allowed the large scale, high throughput analysis of gene expression.

[0036] One example of a method that allows the comparison of the transcriptome of a specific cell type with a second or subsequent transcriptome involves the generation of a set of clones that represent all the transcripts expressed in a cell under the conditions in which the cell is maintained. This may be done by constructing a cDNA library, in which copies of all mRNA transcripts expressed in the cell are cloned into a suitable vector for subsequent analysis.

[0037] Such libraries may be normalized cDNA libraries, in which the distribution of genes in the library has been biased to reduce the number of clones that represent genes with large numbers of transcripts (such as, for example, beta-actin) and thus reduce the repetitive nature of the library. Normalisation thus acts to reduce the frequency of genes expressed at high levels and to enhance the frequency of genes expressed at low levels (see de Fatima Bonaldo et al., Genome Research 6: 791-806 (1996)).

[0038] Libraries may also be subtracted cDNA libraries, in which the distribution of genes is manipulated to remove genes that are expressed in both mRNA populations used to construct the library. The commercially-available PCR Select kit (Clontech, Inc) is an example of a system useful to generate such libraries.

[0039] cDNA clones generated as reflective of the transcriptome of a specific cell type may then be amplified, and processed to evaluate the identity of the nucleic acid clones. For example, multiple clones may be picked and used as template for PCR amplification. The PCR products may then be arrayed onto membranes or glass slides to create nucleic acid arrays. For expression profiling, these arrays are then hybridised to complex nucleic acid probes in order to quantitate the abundance of individual genes contained in the probes.

[0040] A recent summary of nucleic acid array technology that is useful in the analysis of the transcriptome of a cell population is provided in Nature Genetics, (1999) (21 suppl; 1-61). There are various types of array technology currently used, including “microarrays”, or “chips”, which are high density cDNA arrays produced on glass slides, often produced using photolithography. A second type of array is the “macroarray”, which is an array with sub-millimetre spot-spot distances produced on a nylon membrane. One example of this type of array are the nylon-based microarrays sold commercially by Research Genetics Inc. (termed Research Genetics Human GeneFilters) that each contain 5,300 cDNA fragments of known identity. The whole series of arrays covers some 35,000 cDNA fragments. This particular array system (and others like it) allow the identification of transcripts that are down-regulated, as well as those that are up-regulated, since the range of genes used to manufacture the arrays are not biased.

[0041] The step of comparison may be effected by utilising subtracted cDNA libraries. Using this approach, the transcriptome of one specialized cell type under first experimental conditions is subtracted against the transcriptome under second experimental conditions. This reveals the differences in expression under the two experimental conditions tested. When this is performed for both specialized cell types, the differential regulation of gene expression under the two experimental conditions is revealed.

[0042] The step of comparison is through the detection of genes that are differentially regulated in the two specialized cell types examined under the first and second experimental conditions. As an example, a human cardiomyoblast (cell type A) and a human macrophage (cell type B) may be placed at the same temperature and at a high oxygen tension (first experimental conditions [1]). Cells from the same cell types are also incubated at this temperature, yet under conditions of low oxygen tension (second experimental conditions [2]). In this simple example, there are then a minimum of four combinations of cell type and condition, A[1], B[1], A[2] and B[2]. “Snapshots” are taken of the transcriptomes of both cell types under the “normoxic” and the “hypoxic” experimental conditions, by preparing messenger RNA from all four combinations. Differences in the regulation of genes can then be analysed, for example, using a process of subtractive hybridization.

[0043] The mechanism of transcriptome comparison in the above example may be as follows. Subtracted cDNA libraries are separately prepared for hypoxic macrophages and cardiomyoblasts; for both cell types, their cDNA under normoxic conditions is subtracted against their cDNA under hypoxic conditions. This might be effected by harvesting RNA from cells both in normoxia and hypoxia, and preparing cDNA. Subtractive hybridization, optionally including suppression PCR, may then be performed to remove genes from the hypoxic cell cDNA which are also present in cDNA from normoxic cells. Insert DNA from these subtracted libraries can then be amplified and arrayed onto duplicate membranes. Quantitative hybridization with pre-library cDNA material (normoxia and hypoxia) then allows the comparison of differentially-expressed clones in the two cell types. The clones representing hypoxia-inducible genes may be then be identified, for example, by sequencing.

[0044] Other techniques that are suitable for the analysis of the transcriptome of a specific cell type include serial analysis of gene expression (SAGE; Velculescu et al., Science (1995) 270; 484-487), Selective amplification via biotin- and restriction-mediated enrichment (SABRE) (Lavery et al, (1997), PNAS USA 94: p6831-6836); Differential display (for example, indexing differential display reverse transcriptase polymerase chain reaction (DDRT-PCR; Mahadeva et al. (1998) J. Mol.Biol. 284, 1391-1398)); representational difference analysis (RDA) (Hubank (1999) Methods in Enzymology 303: 325-349); differential screening of cDNA libraries (see Sagerstrom et al. (1997) Annu. Rev. Biochem. 66: 751-783); “Advanced Molecular Biology”, R. M. Twyman (1998) Bios Scientific Publishers, Oxford; “Nucleic Acid Hybridization”, M. L. M. Anderson (1999) Bios Scientific Publishers, Oxford); Northern blotting; RNAse protection assays; S1-nuclease protection assays; RT-PCR; real time RT-PCR (Taq-man); EST sequencing; massively parallel signature sequencing (MPSS); and sequencing by hybridization (SBH) (see Drmanac R. et al (1999), Methods in Enzymology 303:165-178). Many of these techniques are reviewed in “Comparative gene-expression analysis” Trends Biotechnol. February 1999;17(2):73-8.

[0045] Methods such as these have been applied widely to study mechanisms of biological response. In particular, microarrays have been used widely to compare gene expression levels between normal and diseased tissue. More typically, however, comparisons are performed to detect changes in gene expression that are associated with specific aspects of disease progression or pathology. For instance, a study of prostate cancer would examine changes associated with the step-wise progression to full malignancy or the dependence on androgens for growth.

[0046] Transcriptome analysis is complemented by the analysis of the complete protein make-up of a cell, referred to as proteomics. The use of two dimensional SDS-PAGE gels in combination with amino acid sequencing by mass spectrometry is currently the most widely-used technique in this field (see “Proteomics to study genes and genomes” Akhilesh Pandey and Matthias Mann, (2000), Nature 405: 837-846). Additionally, the recent developments in the field of protein and antibody arrays now allow the simultaneous detection of a large number of proteins. For example, low-density protein arrays on filter membranes, such as the universal protein array system (Ge H, (2000) Nucleic Acids Res. 28(2), e3) allow imaging of arrayed antigens using standard ELISA techniques and a scanning charge-coupled device (CCD) detector. Immuno-sensor arrays have also been developed that enable the simultaneous detection of clinical analytes. It is now possible using protein arrays, to profile protein expression in bodily fluids, such as in sera of healthy or diseased subjects, as well as in patients pre- and post-drug treatment.

[0047] Antibody arrays also facilitate the extensive parallel analysis of numerous proteins that are hypothetically implicated in a disease or particular physiological state. A number of methods for the preparation of antibody arrays have recently been reported (see Cahill, Trends in Biotechnology, 2000 7:47-51).

[0048] It is not the intention here to review studies that have been conducted in this area previously. However, one example of a physiological condition that has already received considerable attention is the response to hypoxia. Several patent applications have now been published that involve an examination of the genetic response to hypoxia (see WO00/12139, Quark Biotech, Inc.; WO00/12525, Quark Biotech, Inc.; WO99/09049, Quark Biotech, Inc.; WO99/09046, Quark Biotech, Inc.; WO99/48916, The Board of Trustees of the Leland Stanford Jr. University). These patent applications generally utilize methods of subtractive hybridization and differential expression gene microarray analysis to examine this genetic response in certain cell lines. The studies have implicated specific genes as being either repressed or induced under hypoxic conditions as compared to their expression under normoxic conditions. These genes are taught as being useful generally in all cell types, being involved in the (generic) hypoxic response.

[0049] Significantly, the present invention extends this work, and, indeed, defines a significant advance over similar work that has been performed on the genetic mechanisms that act in response to other physiological or genetic stimuli. The present inventors, using the novel methods disclosed herein, have discovered that far from being generic, the cellular response to many physiological conditions differs markedly between different cell types. The cellular response that has been studied in order to illustrate this finding is the response to hypoxia. From these results, it has been inferred herein, quite reasonably, that far from being generic, cellular response mechanisms differ widely, depending on cell type.

[0050] This discovery has far-reaching implications as regards the design of therapeutic agents that are effective to counter a disease or physiological condition. For example, an agent that is effective to prevent the drastic effects of hypoxia in a neuron (the effects of which include stroke) might be totally ineffective in countering the same effects in a cardiomyocyte (chronic ischemic heart disease). Through analysing the mechanism of the hypoxic response in different cell types, it may be, in contrast to the example given above, that a particular gene is involved in the hypoxic response in both cardiomyocytes and neurons. Were this to be the case, this would allow the design of a combined medicament, for example, a combined cardioprotective and neuroprotective agent.

[0051] As discussed in some detail above, ischaemic disease pathologies involve a decrease in the blood supply to a bodily organ, tissue or body part generally caused by constriction or obstruction of the blood vessels. One particular example of an ischaemic disease pathology is myocardial ischaemia, which encompasses several chronic and acute cardiac pathologies that involve the deprivation of the myocardium of its blood supply, usually through coronary artery occlusion. A key component of ischaemia is hypoxia. Following transient ischaemia, the affected tissue may be subjected to reperfusion and re-oxygenation, and this is of significance in its own right.

[0052] Ischaemia/reperfusion is well known to induce cell death in myocardial tissue by apoptosis, leading to impaired fuinction of the myocardium and infarction. Many of the specific molecules required to execute the process of apoptosis are known, but not all of these molecules have been characterized in detail. Cell death may also proceed by a distinct process called necrosis, which unlike apoptosis, is not initiated and controlled by specific and dedicated cellular and biochemical mechanisms (see Nicotera et al., Biochem Soc Symp. 1999; 66:69-73). There is substantial evidence that apoptotic cell death occurs either during or after myocardial ischaemia (Kajstura et aL, Lab Invest. 1996; 74(1):86-107; Cheng et al., Exp Cell Res. 1996; 226(2):316-27; Fliss and Gattinger, Circ Res. 1996; 79(5):949-56; Veinot et al., Hum Pathol. 1997; 28(4):485-92; Bialik et al., J Clin Invest. 1997; 100(6):1363-72; Gottlieb et al., J Clin Invest. 1994; 94(4):1621-8; Gottlieb and Engler, Ann N Y Acad Sci. 1999; 874:412-26). In the laboratory, apoptosis is also induced by subjecting cardiac myocytes to hypoxia (Tanaka et al., Circ Res. September 1994;75(3):426-33; Long et al., J Clin Invest. 1997 99(11): 2635-43).

[0053] Clearly, there is a significant clinical application were a successful method to inhibit apoptosis in ischaemic myocardial tissue to be devised. A specific and effective treatment requires identifying biochemical target(s), which are responsible for mediating apoptosis, specifically in ischaemic myocardial cells. One target which plays a common role in mediating apoptosis in many cell types, namely p53, is not involved in apoptosis resulting from myocardial ischaemia (Bialik et al., J Clin Invest. 1997; 100(6):1363-72). Others have shown that inhibiting key mediators of apoptosis, caspases, provides protection against lethal reperfusion injury, following myocardial ischaemia in rat models (Mocanu et al., Br J Pharmacol. 2000; 130(2):197-200; Yaoita et al., Circulation. 1998 97(3): 276-81; Holly et al., J Mol Cell Cardiol. 1999 31(9): 1709-15). However, this approach lacks specificity, since the caspases play a key role in mediating apoptosis in the majority of manmmalian cell types, where it is usually beneficial. An approach that involves modulating the activity of molecules shown specifically to mediate apoptosis in ischaemic cardiac cells, would present a distinct advantage in both specificity and efficacy.

[0054] There thus remains a great need for the identification of proteins implicated in the physiological mechanism of hypoxia, in order to develop a spectrum of diagnostic and therapeutic agents for use as tools in combating diseases in which hypoxia plays a role. Such genes and the proteins that they encode are candidate targets for antagonist or agonist agents that modulate human disease states. Furthermore, the identified genes are associated with regulatory elements that provide alternative and additional candidate targets for exploitation for the delivery of gene products in a cell-specific fashion. Any genes and regulatory elements identified as having a role in hypoxia may be used directly in therapeutic applications via gene therapy, via recombinant protein methods or via chemical mimetics or as targets for the development of agonists and antagonists such as antibodies, intrabodies, small chemical molecules, peptides, regulatory nucleic acids.

[0055] Novel Targets

[0056] According to a further aspect of the invention, there are provided genes and proteins that are identified using a method according to any one of the above-described aspects of the invention. Certain proteins, whose sequences are identified herein as SEQ ID NOS: 1, 3, 5, 7, 9, 11, 13, 15, 17, 19, 21, 23, 25, 27, 29, 31, 33, 35, 37, 39, 41, 43, 45, 47, 49, 51, 53, 55, 57, 59, 63, 67, 69, 73, 75, 77, 85, 85a, 87, 89, 91, 93, 95, 99, 103, 113, 115, 119, 121, 129, 131, 133, 137, 139, 141, 145, 151, 153, 157, 159, 163, 169, 181, 187, 201, 205, 207, 209, 527, 529 and 531, are functionally annotated for the first time. At present, all of these sequences are only identified as “hypothetical proteins” in the public databases. Each and every one of these sequences forms an embodiment of this aspect of the invention.

[0057] The invention also includes proteins whose amino acid sequences are encoded by a nucleic acid sequence recited in various cDNAs and ESTs deposited in the public databases, or encoded by a gene identified from such an EST. These cDNAs and ESTs are presented herein as SEQ ID NOS: 62, 64, 66, 68, 70, 72, 74, 76, 78, 80, 82, 84, 86, 86a, 88, 90, 90a, 92, 92a, 94, 96, 98, 100, 102, 104, 106, 108, 110, 112, 114, 116, 118, 120, 122, 124, 126, 128, 130, 132, 134, 136, 138, 140, 142, 144, 146, 148, 150, 152, 154, 156, 158, 160, 162, 164, 166, 168, 170, 172, 174, 176, 178, 180, 182, 184, 186, 188, 190, 192, 194, 196, 198, 200, 202, 204, 206, 208, 210, 212, 214, 216, 528, 530 and 532. At present, all of these cDNA and EST sequences are functionally unannotated in the public databases. Each and every one of these sequences forms an embodiment of this aspect of the invention.

[0058] One embodiment of this aspect of the invention provides substantially purified polypeptide, which polypeptide:

[0059] i) comprises the amino acid sequence as recited in any one of SEQ ID NOS: 1, 3, 5, 7, 9, 11, 13, 15, 17, 19, 21, 23, 25, 27, 29, 31, 33, 35, 37, 39, 41, 43, 45, 47, 49, 51, 53, 55, 57, 59, 63, 67, 69, 73, 75, 77, 85, 85a, 87, 89, 91, 93, 95, 99, 103, 113, 115, 119, 121, 129, 131, 133, 137, 139, 141, 145, 151, 153, 157, 159, 163, 169, 181, 187, 201, 205, 207, 209, 527, 529 or 531;

[0060] ii) has an amino acid sequence encoded by a nucleic acid sequence recited in any one of SEQ ID NOS: 2, 4, 6, 8, 10, 12, 14, 16, 18, 20, 22, 24, 26, 28, 30, 32, 34, 36, 38, 40, 42, 44, 46, 48, 50, 52, 54, 56, 58, 60, 62, 64, 66, 68, 70, 72, 74, 76, 78, 80, 82, 84, 86, 86a, 88, 90, 90a, 92, 92a, 94, 96, 98, 100, 102, 104, 106, 108, 110, 112, 114, 116, 118, 120, 122, 124, 126, 128, 130, 132, 134, 136, 138, 140, 142, 144, 146, 148, 150, 152, 154, 156, 158, 160, 162, 164, 166, 168, 170, 172, 174, 176, 178, 180, 182, 184, 186, 188, 190, 192, 194, 196, 198, 200, 202, 204, 206, 208, 210, 212, 214, 216, 528, 530 and 532 or encoded by a gene identified from an EST recited in any one of these SEQ ID NOS;

[0061] iii) is a fragment of a polypeptide according to i) or ii), provided that said fragment retains a biological activity possessed by the full length polypeptide of i) or ii), or has an antigenic determinant in common with the polypeptide of i) or ii); or

[0062] iv) is a functional equivalent of a polypeptide of i), ii) or (iii).

[0063] The polypeptide sequences recited in SEQ ID NOS: 1, 3, 5, 7, 9, 11, 13, 15, 17, 19, 21, 23, 25, 27, 29, 31, 33, 35, 37, 39, 41, 43, 45, 47, 49, 51, 53, 55, 57, 59, 63, 67, 69, 73, 75, 77, 85, 85a, 87, 89, 91, 93, 95, 99, 103, 113, 115, 119, 121, 129, 131, 133, 137, 139, 141, 145, 151, 153, 157, 159, 163, 169, 181, 187, 201, 205, 207, 209, 527, 529 and 531 were, prior to the present disclosure, unannotated in the literature and public sequence databases. Accordingly, until now, no biological function has been attributed to these polypeptide sequences; each of these sequences is generally labelled in the databases as a “hypothetical protein”. The methods of the present invention, described above, have now elucidated a biological function for these polypeptides, in that they have been found to be differentially regulated under physiological conditions of hypoxia.

[0064] These discoveries allow the development of regulators, such as small drug molecules, that affect the activity of these polypeptides, so allowing diseases and physiological conditions that are caused by hypoxia, or in which hypoxia has been implicated, to be treated. These discoveries also allow the development of diagnostic agents that are suitable for the detection of hypoxia in biological tissues and, through the identification of mutations and polymorphisms (such as SNPs) within genes coding for the proteins implicated herein, allows the assessment of an individual's risk of being susceptible to diseases and physiological conditions in which hypoxia is implicated.

[0065] The biological activity of polypeptides whose sequences are listed in SEQ ID NOS: 1, 3, 5, 7, 9, 11, 13, 15, 17, 19, 21, 23, 25, 27, 29, 31, 33, 35, 37, 39, 41, 43, 45, 47, 49, 51, 53, 55, 57, 59, 63, 67, 69, 73, 75, 77, 85, 85a, 87, 89, 91, 93, 95, 99, 103, 113, 115, 119, 121, 129, 131, 133, 137, 139, 141, 145, 151, 153, 157, 159, 163, 169, 181, 187, 201, 205, 207, 209, 527, 529 and 531 has been found to be hypoxia-regulated. The expression of some of these polypeptides has been found to be induced under conditions of hypoxia, whilst the expression of other polypeptides has been found to be repressed. By “hypoxia-induced” is meant that the polypeptide is expressed at a higher level when a cell is exposed to hypoxic conditions as compared to its expression level under normoxic conditions. By “hypoxia-repressed” is meant that the polypeptide is expressed at a lower level when a cell is exposed to hypoxic conditions as compared to its expression level under normoxic conditions.

[0066] The following polypeptides have been found to be hypoxia-induced: those polypeptides whose amino acid sequence is recited in SEQ ID NOS: 1, 3, 5, 7, 9, 11, 13, 15, 17, 19, 21, 23, 25, 27, 29, 31, 33, 63, 67, 69, 73, 75, 77, 85, 85a, 87, 89, 91, 93, 95, 99, 103, 113, 115, 119, 121, 129, 131, 133, 137, 139, 141, 527, 529 and 531; and those polypeptides whose amino acid sequence is encoded by a nucleic acid sequence recited in SEQ ID NOS: 2, 4, 6, 8, 10, 12, 14, 16, 18, 20, 22, 24, 26, 28, 30, 32, 34, 64, 66, 68, 70, 72, 74, 76, 78, 80, 82, 84, 86, 86a, 88, 90, 90a, 92, 92a, 94, 96, 98, 100, 102, 104, 106, 108, 110, 112, 114, 116, 118, 120, 122, 124, 126, 128, 130, 132, 134, 136, 138, 140, 142, 144, 528, 530 and 532 or is encoded by a gene identified from an EST recited in any one of these SEQ ID NOS.

[0067] The following polypeptides have been found to be hypoxia-repressed: those polypeptides whose amino acid sequence is recited in SEQ ID NOS: 35, 37, 39, 41, 43, 45, 47, 49, 51, 53, 55, 57, 59, 145, 151, 153, 157, 159, 163, 169, 181, 187, 201, 205, 207 and 209; and those polypeptides whose amino acid sequence is encoded by a nucleic acid sequence recited in SEQ ID NOS: 36, 38, 40, 42, 44, 46, 48, 50, 52, 54, 56, 58, 60, 146, 148, 150, 152, 154, 156, 158, 160, 162, 164, 166, 168, 170, 172, 174, 176, 178, 180, 182, 184, 186, 188, 190, 192, 194, 196, 198, 200, 202, 204, 206, 208, 210, 212, 214 and 216, or encoded by a gene identified from an EST recited in any one of these SEQ ID NOS.

[0068] For the purposes of this document, the term “hypoxia” should be taken to mean an environment of oxygen tension such that the oxygen content is between about 5% and 0.1% (v/v). In most cases, hypoxic tissue will have an oxygen content that is less than or equal to about 2%. The term “normoxia” should be taken to mean conditions comprising a normal level of oxygen for the environment concerned. Normoxic tissue typically has an oxygen content above about 5%.

[0069] The polypeptide sequences whose amino acid sequence is encoded by a nucleic acid sequence recited in SEQ ID NOS: 62, 64, 66, 68, 70, 72, 74, 76, 78, 80, 82, 84, 86, 86a, 88, 90, 90a, 92, 92a, 94, 96, 98, 100, 102, 104, 106, 108, 110, 112, 114, 116, 118, 120, 122, 124, 126, 128, 130, 132, 134, 136, 138, 140, 142, 144, 146, 148, 150, 152, 154, 156, 158, 160, 162, 164, 166, 168, 170, 172, 174, 176, 178, 180, 182, 184, 186, 188, 190, 192, 194, 196, 198, 200, 202, 204, 206, 208, 210, 212, 214, 216, 528, 530 and 532, or whose amino acid sequence is encoded by a gene identified from an EST recited in any one of these SEQ ID NOS, were also, prior to the present disclosure, unannotated in the literature and public sequence databases, meaning that until now, no biological function has been attributed to these polypeptide sequences.

[0070] The sequences in this group fall into a number of different categories. The first of these are cDNA clones, for which a protein sequence has not been predicted by the depositor. A second category is expressed sequence tag (EST) sequences that are represented in the UniGene database (http address www.ncbi.nlm.nih.gov/UniGene/), which contain modest or weak homology to known proteins when translated. ESTs are single-pass sequence files of the 5′ region of an organism's expressed genome as accessed via a force cloned cDNA library. EST sequences tend to be short and as a general rule are error-prone. UniGene (see http address www.ncbi.nlm.nih.gov/Web/Newsltr/aug96.html for review) is an experimental system for automatically partitioning these EST sequences into a non-redundant set of gene-oriented clusters. Each UniGene cluster contains sequences that represent a unique gene, as well as related information such as the tissue types in which the gene has been expressed and map location. A third category of hits identified by the methods described herein is EST sequences that are contained in Unigene clusters, but which are not annotated and exhibit no homologies to proteins contained in the public databases. The fourth and final category encompasses singleton EST sequence entries that are not incorporated as entries in the Unigene database and that only appear as single entries in the public databases.

[0071] The methods of the present invention, described above, have now elucidated a biological function for polypeptides that are encoded by genes incorporating cDNA and EST sequences that fall into the four categories set out above, in that these sequences have been found to be differentially regulated under physiological conditions of hypoxia. Such polypeptides may have an amino acid sequence that is encoded by a nucleic acid sequence recited in any one of SEQ ID NOS: 62, 64, 66, 68, 70, 72, 74, 76, 78, 80, 82, 84, 86, 86a, 88, 90, 90a, 92, 92a, 94, 96, 98, 100, 102, 104, 106, 108, 110, 112, 114, 116, 118, 120, 122, 124, 126, 128, 130, 132, 134, 136, 138, 140, 142, 144, 146, 148, 150, 152, 154, 156, 158, 160, 162, 164, 166, 168, 170, 172, 174, 176, 178, 180, 182, 184, 186, 188, 190, 192, 194, 196, 198, 200, 202, 204, 206, 208, 210, 212, 214 and 216. However, the EST sequences in particular may not be part of the actual coding sequence for a gene, often representing regulatory regions of the gene, or regions that are transcribed, but not translated into polypeptide. Accordingly, this aspect of the invention also includes polypeptides that are encoded by a gene identified from an EST recited in any one of SEQ ID NOS: 62, 64, 66, 68, 70, 72, 74, 76, 78, 80, 82, 84, 86, 86a, 88, 90, 90a, 92, 92a, 94, 96, 98, 100, 102, 104, 106, 108, 110, 112, 114, 116, 118, 120, 122, 124, 126, 128, 130, 132, 134, 136, 138, 140, 142, 144, 146, 148, 150, 152, 154, 156, 158, 160, 162, 164, 166, 168, 170, 172, 174, 176, 178, 180, 182, 184, 186, 188, 190, 192, 194, 196, 198, 200, 202, 204, 206, 208, 210, 212, 214 and 216.

[0072] SM20 Homologues

[0073] It has now been discovered that a polypeptide encoded by a gene identified from the EST recited in SEQ ID No 86, having the Protein accession number BAB15101; herein referred to as SEQ ID NO: 85 (encoded by Homo sapiens cDNA: FLJ21620 fis, clone COL07838 Nucleotide accession AK025273) is regulated by hypoxia. Other public domain sequences corresponding to this gene include Homo sapiens cDNA: FLJ23265 fis, clone COL06456 Nucleotide accession AK026918. Accordingly, when referring in the present specification to the EST recited in SEQ ID No 86, it is intended that these gene and protein sequences are also embraced. This gene was identified using Research Genetics Human GeneFilters arrays, which contain an EST corresponding to the gene (accession number R00332) In the art, the gene is now termed EGL nine (C.elegans) homolog 3.

[0074] There are no reports that describe the function of this human gene. However, a high degree of amino acid homology is observed between the protein encoded by this gene, and a rat protein called “Growth factor responsive smooth muscle protein” or “SM20” (Nucleotide accession U06713; Protein accession A53770). An alignment of single letter amino acid sequences is shown below. Over the italicized region there is 97% amino acid similarity and 96% amino acid identity.

| | | |
|---|---|---|
| A53770 | (1) | MTLRSRRGFLSFLPGLRPPRRWLRISKRGPPTSHWASPALGGRTLHTSCR |
| BAB15101 | (1) | -------------------------------------------------- |
| | | 51 100 |
| A53770 | (51) | SQSGTPFSSEFQATFPAFAAKVARGPWLPQVVEPPARLSASPLCVRSGQA |
| BAB15101 | (1) | -------------------------------------------------- |
| | | 101 150 |
| A53770 | (101) | LGACTLGVPRLGSVSEMPLGHIMRLDLEKIALEYIVPCLHEVGFCYLDNF |
| BAB15101 | (1) | ----------------MPLGHIMRLDLEKIALEYIVPCLHEVGFCYLDNF |
| | | 151 200 |
| A53770 | (151) | LGEVVGDCVLERVKQLHYNGALRDGQLAGPRAGVSKRHLRGDQITWIGGN |
| BAB15101 | (35) | LGEVVGDCVLERVKQLHCTGALRDGQLAGPRAGVSKRHLRGDQITWIGGN |
| | | 201 250 |
| A53770 | (201) | EEGCEAINFLLSLIDRLVLYCGSRLGKYYVKERSKAMVACYPGNGTGYTVR |
| BAB15101 | (85) | EEGCEAISFLLSLIDRLVLYCGSRLGKYYVKERSKAMVACYPGNGTGYVR |
| | | 251 300 |
| A53770 | (251) | HVDNPNGDGRCITCIYYLNKNWDAKLHGGVLRIFPEGKSFVADVEPIFDR |
| BAB15101 | (135) | 301 350 |
| AS5770 | (301) | LLFSWSDRRNPHEVQPSYATRYAMTVWYFDAEERAEAKKKFRNLTRKTES |
| BAB15101 | (185) | LLFFWSDRRNPHEVQPSYATRYAMTVWYFDAEERAEAKKKFRNLTRKTES |
| | | 351 |
| A53770 | (351) | ALAKD |
| BAB15101 | (235) | ALTED |

[0075] The high degree of amino acid similarity suggests that the human protein BAB15101 has an equivalent biochemical function to the rat protein A53770 (“Growth factor responsive smooth muscle protein” or “SM20”). Recent publications have shown that SM20 functions to promote apoptosis in neurons (Lipscomb et al., J Neurochem 1999; 73(1):429-32; Lipscomb et al., J Biol Chem. Feb. 16, 2001;276(7):5085-92). Significantly, SM20 has been shown to be expressed at high levels in the heart (Wax et al., J Biol Chem 1994; 269(17): 13041-7). This aspect of the invention therefore provides a substantially purified prolyl 4-hydroxylase polypeptide, which polypeptide:

[0076] i) comprises the amino acid sequence recited in SEQ ID NO: 85;

[0077] ii) has an amino acid sequence encoded by a nucleic acid sequence recited in SEQ ID NO: 86;

[0078] iii) is a fragment of a polypeptide according to i) or ii), provided that said fragment retains a biological activity possessed by the full length polypeptide of i) or ii), or has an antigenic determinant in common with the polypeptide of i) or ii); or

[0079] iv) is a functional equivalent of a polypeptide of i), ii) or (iii).

[0080] It has also been discovered that there is a so far undisclosed splice variant of the polypeptide sequence recited in SEQ ID NO: 85. The polypeptide sequence recited in SEQ ID NO: 85a is a novel isoforn of the polypeptide sequence recited in SEQ ID NO: 85. The novel cDNA isoform of FLJ21620 fis, clone COL07838, lacks an internal stretch of nucleotides, probably due to an alternative splicing event. The nucleotide sequence of the sequenced portion of the new variant is shown below, and is referred to herein as SEQ ID No. 86a:

| | |
|---|---|
| 1 | CTCGATTCTG CGGGCGAGAT GCCCCTGGGA CACATCATGA GGCTGGACCT |
| 51 | GGAGAAAATT GCCCTGGAGT ACATCGTGCC CTGTCTGCAC G*AGGCAATGG |
| 101 | TGGCTTGCTA TCCGGGAAAT GGAACAGGTT ATGTTCGCCA CGTGGACAAC |
| 151 | CCCAACGGTG ATGGTCGCTG CATCACCTGC ATCTACTATC TGAACAAGAA |
| 201 | TTGGGATGCC AAGCTACATG GTGGGATCCT GCGGATATTT CCAGAGGGGA |
| 251 | AATCATTCAT AGCAGATGTG GAGCCCATTT TTGACAGACT CCTGTTCTTC |
| 301 | TGGTCAGATC GTAGGAACCC ACACGAAGTG CAGCCCTCTT ACGCAACCAG |
| 351 | ATATGCTATG ACTGTCTGGT ACTTTGATGC TGAAGAAAGG GCAGAAGCCA |
| 401 | AAAAGAAATT CAGGAATTTA ACTAGGAAAA CTGAATCTGC CCTCACTGAA |
| 451 | GAC |

[0081] The part of FLJ21620 fis, clone COL07838 which is missing in the above sequence at the position indicated by an asterisk, is shown below:

| | |
|---|---|
| 1 | AGGTGGGCTT CTGCTACCTG GACAACTTCC TGGGCGAGGT GGTGGGCGAC |
| 51 | TGCGTCCTGG AGCGCGTCAA GCAGCTGCAC TGCACCGGGG CCCTGCGGGA |
| 101 | CGGCCAGCTG GCGGGGCCGC GCGCCGGCGT CTCCAAGCGA CACCTGCGGG |
| 151 | GCGACCAGAT CACGTGGATC GGGGGCAACG AGGAGGGCTG CGAGGCCATC |
| 201 | AGCTTCCTCC TGTCCCTCAT CGACAGGCTG GTCCTCTACT GCGGGAGCCG |
| 251 | GCTGGGCAAA TACTACGTCA AGGAGAGGTC TA |

[0082] At the protein level the new variant forms a functional protein, and retains the open reading frame, as shown below (SEQ ID No.:85a). This sequence starts and finishes with the same amino acid sequence but is missing an internal portion compared with the translation of FLJ21620 fis, clone COL07838.

| | |
|---|---|
| 1 | MPLGHIMRLD LEKIALEYIV PCLHEAMVAC YPGNGTGYVR HVDNPNGDGR |
| 51 | CITCIYYLNK NWDAKLHGGI LRIFPEGKSF IADVEPIFDR LLFFWSDRRN |
| 101 | PHEVQPSYAT RYAMTVWYFD AEERAEAKKK FRNLTRKTES ALTED |

[0083] This aspect of the invention therefore provides a substantially purified prolyl 4-hydroxylase polypeptide, which polypeptide:

[0084] i) comprises the amino acid sequence recited in SEQ ID NO: 85a;

[0085] ii) has an amino acid sequence encoded by a nucleic acid sequence recited in SEQ ID NO: 86a;

[0086] iii) is a fragment of a polypeptide according to i) or ii), provided that said fragment retains a biological activity possessed by the full length polypeptide of i) or ii), or has an antigenic determinant in common with the polypeptide of i) or ii); or

[0087] iv) is a functional equivalent of a polypeptide of i), ii) or (iii).

[0088] It has also been discovered that a polypeptide encoded by a gene identified from the EST recited in SEQ ID No 90, having the Protein accession number CAB81622, is regulated by hypoxia. The encoding human gene has been annotated in the UniGene database as “Similar to rat smooth muscle protein SM-20”; the nucleotide sequence is contained within the nucleotide accession AL117352. More recently, a longer fragment of this gene has been cloned, named c1orf12, or EGLN1 (Nucleotide accession AAG34568; Protein accession AAG34568). Accordingly, when referring in the present specification to the EST recited in SEQ ID No 90, it is intended that these gene and protein sequences are also embraced.

[0089] This distinct human gene, encoding a protein related to SM20 and EGLN3 (BAB15101), is also induced in response to hypoxia. This gene was identified using Research Genetics Human GeneFilters arrays, which contain an EST corresponding to the gene (accession number H56028). The protein sequence, SEQ ID No 89, is given below:

| | |
|---|---|
| 1 | MANDSGGPGG PSPSERDRQY CELCGKNENL LRCSRCRSSF YCCKEHQRQD WKKHKLVCQG |
| 61 | SEGALGHGVG PHQHSGPAPP AAVPPPRAGA REPRKAAARR DNASGDAAKG KVKAKPPADP |
| 121 | AAAASPCRAA AGGQGSAVAA EAEPGKEEPP ARSSLFQEKA NLYPPSNTPG DALSPGGGLR |
| 181 | PNGQTKPLPA LKLALEYIVP CMNKHGICVV DDFLGKETGQ QIGDEVRALH DTGKFTDGQL |
| 241 | VSQKSDSSKD IRGDKITWIE GKEPGCETIG LLMSSMDDLI RHCNGKLGSY KINGRTKAMV |
| 301 | ACYPGNGTGY VRHVDNPNGD GRCVTCIYYL NKDWDAKVSG GILRIFPEGK AQFADIEPKF |
| 361 | DRLLFFWSDR RNPHEVQPAY ATRYAITVWY FDADERARAK VKYLTGEKGV RVELNKPSDS |
| 421 | VGKDVF |

[0090] This aspect of the invention therefore provides a substantially purified prolyl 4-hydroxylase polypeptide, which polypeptide:

[0091] i) comprises the amino acid sequence recited in SEQ ID NO: 89;

[0092] ii) has an amino acid sequence encoded by a nucleic acid sequence recited in SEQ ID NO: 90;

[0093] iii) is a fragment of a polypeptide according to i) or ii), provided that said fragment retains a biological activity possessed by the full length polypeptide of i) or ii), or has an antigenic determinant in common with the polypeptide of i) or ii); or

[0094] iv) is a functional equivalent of a polypeptide of i), ii) or (iii).

[0095] Independently to this, a fragment of this gene has been cloned from a cDNA library derived from hypoxic human cardiomyoblasts, and it has been shown that the gene is increased in expression in response to hypoxia in this cell type (see Table 1 herein; penultimate row). The nucleotide sequence of this cDNA fragment, referred to herein as SEQ ID No 90a is:

| | |
|---|---|
| 1 | ACCTCTACAG TTGTAAAAAG TATTAGATTC TACTATCTGT GGGTTGTGCT TGCCAGACAG |
| 61 | GTCTTAAATT GTATATTTTT TGGAAAAGTT TATATACTCT CTTAGGAATC ATTGTGAAAA |
| 121 | GATCAAGAAA TCAGGATGGC CATTTATTTA ATATCCATTC ATTTCATGTT AGTGGGACTA |
| 181 | TTAACTTGTC ACCAAGCAGG ACTCTATTTC AAACAAAATT TAAAACTGTT TGTGGCCTAT |
| 241 | ATGTGTTTAA TCCTGGTTAA AGATAAAGCT TCATAATGCT GTTTTTATTC AACACATTAA |
| 301 | CCAGCTGTAA AACACAGACC TTTATCAAGA GTAGGCAAAG ATTTTCAGGA TTCATATACA |
| 361 | GATAGACTAT AAAGTCATGT AATTTGAAAA GCAGTGTTTC ATTATGAAAG AGCTCTCAAG |
| 421 | TTGCTTGTAA AGCTAATCTA ATTAAAAAGA TGTATAAATG TTGTCAAAAA AAAAAAAAAA |
| 481 | AAAAGAAAAA AAGT |

[0096] In the light of this novel discovery reported herein that these human equivalents of SM20 are induced by hypoxia, it is herein proposed that in cardiac ischaemia, the resulting apoptosis is due at least in part, to increased expression of these genes.

[0097] The therapeutic modulation of the activity of EGLN3 (BAB15101; SEQ ID NO: 85), the EGLN3 splice variant (SEQ ID NO: 85a), EGLN1 (c1orf12; AAG34568; SEQ ID NO: 89), CAB81622, SM20 and other equivalent proteins and encoding genes therefore provides a novel means for the treatment of myocardial ischaemia, through the alteration of the propensity of myocardial cells to undergo apoptosis. For example, a suitable treatment may involve altering the susceptibility of ischaemic myocardial tissue to subsequent reperfusion and re-oxygenation, or may involve modulating the susceptibility of chronic ischaemic myocardial tissue (including forms of angina) to later more severe ischaemia, which would result in myocardial infarction. It is submitted that, by way of analogy, cerebral ischaemia may be treated using the same principle.

[0098] These data provide the first connection between these related genes and the physiological response to hypoxia. Recently published research papers have identified that the protein products of these genes can act as proline hydroxylases (see Bruick RK et al Science. 2001 294:1337-40 and Epstein AC et al Cell. 107:43-54). This is consistent with our observations that certain proline hydroxylases are induced in response to hypoxia and the genes EGLN1 and EGLN3 are part of the hypoxia response. For example, two genes encoding proline hydroxylases have been identified herein as being increased in expression in response to hypoxia (proline 4-hydroxylase, alpha polypeptide 1; SeqID: 231/232, proline 4-hydroxylase, alpha polypeptide II; SeqID: 349/350). This identified a functional significance of proline hydroxylation as a response to hypoxia. A preferred embodiment of the invention thus includes methods for modulating the biological response to hypoxia by modulating the proline hydroxylase activity of the EGLN3 (BAB15101; SEQ ID NO: 85), the EGLN3 splice variant (SEQ ID NO: 85a) c1orf12 (AAG34568; SEQ ID NO: 89), CAB81622, SM20 and other equivalent proteins.

[0099] Furthermore, a number of bacteria, such as moraxella, are thought to be involved in the initiation of inflammatory diseases. Many bacteria contain, within their genome, genes encoding proteins that share homology to the EGLN family of prolyl hydroxylases. We therefore propose that these bacterial genes may initiate a hypoxic like response at the site of infection thereby causing localized inflammation. The resulting inflammatory infiltrate could then cause the tissue to become hypoxic thereby continuing the cycle of hypoxia response.

[0100] In view of the predicted function of the EGLN3 (BAB15101; SEQ ID NO: 85), the EGLN3 splice variant (SEQ ID NO: 85a), EGLN1 (c1orf12; AAG34568; SEQ ID NO: 89), CAB81622, SM20 polypeptides and other equivalent proteins, it is considered likely that this protein will form complexes with various cellular substrates, including Hif1alpha, Hif2alpha, Hif3alpha (see Gu et al., 1998, Gene Expr; 7(3):205-13) and other members of the PAS-domain transcription factor family. A further embodiment of this aspect of the invention thus provides a polypeptide complex comprising a EGLN3 (BAB15101; SEQ ID NO: 85), the EGLN3 splice variant (SEQ ID NO: 85a), EGLN1 (c1orf12; AAG34568; SEQ ID NO: 89), CAB81622, SM20 polypeptide or a functional equivalent thereof, and a polypeptide member of the PAS-domain transcription factor family, such as Hif1alpha, Hif2alpha or Hif3alpha.

[0101] These discoveries allow the development of regulators, such as small drug molecules, that affect the activity of these polypeptides, so allowing diseases and physiological conditions that are caused by hypoxia, or in which hypoxia has been implicated, to be treated. These discoveries also allow the development of diagnostic agents that are suitable for the detection of hypoxia in biological tissues and, through the identification of mutations and polymorphisms (such as SNPs) within genes coding for the proteins implicated herein, allows the assessment of an individual's risk of being susceptible to diseases and physiological conditions in which hypoxia is implicated.

[0102] As discussed in detail below, fragments and functional equivalents, including splice variants of the EGLN3 (BAB15101; SEQ ID NO: 85), the EGLN3 splice variant (SEQ ID NO: 85a) c1orf12 (AAG34568; SEQ ID NO: 89), CAB81622, SM20 and other equivalent proteins are included within the present invention, in addition to ligands that bind specifically to these proteins. Furthermore, the invention also embraces purified and isolated nucleic acid molecules encoding these proteins, fragments and functional equivalents, vectors containing such nucleic acid molecules and host cells transformed with these vectors.

[0103] The therapeutic and diagnostic applications discussed above are also equally relevant to this aspect of the invention. For example, small molecule inhibitors of the EGLN3 (BAB15101; SEQ ID NO: 85), the EGLN3 splice variant (SEQ ID NO: 85a), EGLN1 (c1orf12; AAG34568; SEQ ID NO: 89), CAB81622, SM20 and other equivalent proteins, and encoding genes are envisaged for utility as pharmaceutical agents, particularly in modulating the proline hydroxylase activity of the EGLN3 (BAB15101; SEQ ID NO: 85), the EGLN3 splice variant (SEQ ID NO: 85a), EGLN1 (c1orf12; AAG34568; SEQ ID NO: 89), CAB81622, and SM20 proteins.

[0104] Truncated or chimeric inhibitory derivatives of the encoding genes, or distinct genes that encode regulators of the EGLN3 (BAB15101; SEQ ID NO: 85), EGLN3 splice variant (SEQ ID NO: 85a); EGLN1 (c1orf12; AAG34568; SEQ ID NO: 89), CAB81622, and SM20 encoding genes, are also envisaged for utility for gene therapy.

[0105] An alignment of the amino acid sequences of rat SM20 (Accession A53770), its human equivalent (Accession BAB15101; SEQ ID NO: 85) and this distinct human homologue (Accession CAB81622 or AAG34568; SEQ ID NO: 89) is shown below:

| | | |
|---|---|---|
| | | 1 50 |
| BAB15101 | (1) | -------------------------------------------------- |
| A53770 | (1) | -------------------------------------------------- |
| AAG34568 | (1) | MANDSGGPGGPSPSERDRQYCELCGKMENLLRCSRCRSSFYCCKEHQRQD |
| Consensus | (1) | |
| | | 51 100 |
| BAB15101 | (1) | -------------------------------------------------- |
| A53770 | (1) | -----MTLRSRRGFLSFLPGLRPPRRWLRISKRGPPTSHWASP-----AL |
| AAG34568 | (51) | WKKHKLVCQGSEGALGHGVGPHQHSGPAPPAAVPPPRAGAREPRKAAARR |
| Consensus | (51) | L G L G A PP A P |
| | | 101 150 |
| BAB15101 | (1) | -------------------------------------------------- |
| A53770 | (41) | GGRTLHYSCRSQSGTPFSSEFQATFPAFAAKVARGPWLPQVVEPPAR--- |
| AAG34568 | (101) | DNASGDAAKGKVKAKPPADPAAAASPCRAAAGGQGSAVAAEAEPGKEEPP |
| Consensus | (101) | S A A P A A P AA A G L EP |
| | | 151 200 |
| BAB15101 | (1) | -----------------------------MPLGHIMRLDLEKIALEYIVP |
| A53770 | (88) | LSASPLCVRSGQALGACTLGVPRLGSVSEMPLGHIMRLDLERIALEYIVP |
| AAG34568 | (151) | ARSSLFQEKANLYPPSNTPGDALSPGGGLRPNGQTKPLPALKLALEYIVP |
| Consensus | (151) | AS KA A T G MPLGHIMRLDLEKIALEYIVP |
| | | 201 250 |
| BAB15101 | (22) | CLHEVGFCYLDNFLGEVVGDCVLERVKQLHCTGALRDGQLAGPRAGVSKR |
| A53770 | (138) | CLHEVGFCYLDNFLGEVVGDCVLERVKQLHYNGALRDGQLAGPRAGVSKR |
| AAG34568 | (201) | CMNKHGICVVDDFLGKETGQQIGDEVRALHDTGKFTDGQLVSQKS-DSSK |
| Consensus | (201) | CLHEVGFCYLDNFLGEVVGDCVLERVKQLH TGALRDGQLAGPRAGVSKR |
| | | 251 300 |
| BAB15101 | (72) | HLRGDQITWIGGNEEGCEAISFLLSLIDRLVLYCGSRLGKYYVKERSKAM |
| AS3770 | (188) | HLRGDQITWIGGNEEGCEAINFLLSLIDRLVLYCGSRLGKYYVKERSKAM |
| AAG34568 | (250) | DIRGDKITWIEGKEPGCETIGLLMSSMDDLIRHCNGKLGSYKINGRTKAM |
| Consensus | (251) | HLRGDQITWIGGNEEGCEAI FLLSLIDRLVLYCGSRLGKYYVKERSKAM |
| | | 301 350 |
| BAB1501 | (122) | VACYPGNGTGYVRHVDNPNGDGRCITCIYYLNKNWDAKLHGGILRIFPEG |
| AS53770 | (238) | VACYPGNGTGYVRHVDNPNGDGRCITCIYYLNKNWDAKLHGGVLRIFPEG |
| AAG34568 | (300) | VACYPGNGTGYVRHVDNPNGDGRCVTCIYYLNKDWDAKVSGGILRIFPEG |
| Consensus | (301) | VACYPGNGTGYVRHVDNPNGDGRCITCIYYLNKNWDAKLHGGILRIFPEG |
| | | 351 400 |
| BAB15101 | (172) | KSFIADVEPIFDRLLFFWSDRRNPHEVQPSYATRYAMTVWYFDAEERAEA |
| AS5770 | (288) | KSFVADVEPIFDRLLFSWSDRRNPHEVQPSYATRYAMTVWYFDAEERAEA |
| AAG34568 | (350) | KAQFADIEPKFDRLLFFWSDRRNPHEVQPAYATRYAITVWYFDADERARA |
| Consensus | (351) | KSFIADVEPIFDRLLFFWSDRRNPHEVQPSYATRYAMTVWYFDAEERAEA |
| | | 401 427 |
| BAB15101 | (222) | KKKFRNLTRKTESALTED--------- |
| A53770 | (338) | KKKFRNLTRKTESALAKD--------- |
| AAG34568 | (400) | KVKYLTGEKGVRVELNKPSDSVGKDVF |
| Consensus | (401) | KKKFRNLTRKTESAL KD |

[0106] From this sequence alignment, a highly conserved region of amino acid sequence may be noted (italicized regions), the consensus of which is as follows:

[0107] KAMVACYPGNGTGYVRHVDNPNGDGRCITCIYYLNKNWDAKLHGGILRIFPEGKSFIADVEP IFDRLLFFWSDRRNPHEVQPSYATRYAMTVWYFDAEERAEAKKK

[0108] This is presumably a functional domain. The region of sequence lost in the splice variant, SEQ ID No. 85a, is directly upstream to the conserved domain. This consensus sequence, and variants thereof, may be used in the identification of other proteins that are implicated in the biological response to hypoxia. This aspect of the invention therefore provides a substantially purified polypeptide comprising the consensus sequence:

[0109] KAMVACYPGNGTGYVRHVDNPNGDGRCITCIYYLNKNWDAKLHGGILRIFPEGKSFIADVEP IFDRLLFFWSDRRNPHEVQPSYATRYAMTVWYFDAEERAEAKKK, or a variant thereof.

[0110] The invention also provides a substantially purified polypeptide comprising the consensus sequence:

[0111] KAMVACYPGNGTGYVRHVDNPNGDGRCITCIYYLNKNWDAKLHGGILRIFPEGKSFIADVEP IFDRLLFFWSDRRNPHEVQPSYATRYAMTVWYFDAEERAEAKKK, or a variant thereof, in the treatment or diagnosis of a hypoxia-related disease or condition.

[0112] Neither this consensus domain nor any proteins that contain this domain have been previously associated with the cellular response to hypoxia/ischaemia. Searches of the public databases indicate that the human genome contains several genes that encode proteins that contain this consensus sequence. These proteins may have similar functions or may function in the same biochemical pathway, potentially with an antagonistic effect.

[0113] By “variant” is meant a variation of the consensus sequence given above, that exhibits a degree of homology with the consensus sequence above a certain threshold level of identity or similarity. Degrees of identity and similarity can be readily calculated according to methods known in the art (see, for example, Computational Molecular Biology, Lesk, A. M., ed., Oxford University Press, New York, 1988; Biocomputing. Informatics and Genome Projects, Smith, D. W., ed., Academic Press, New York, 1993). Typically, greater than 50% identity between two sequences is considered to be an indication of functional equivalence. Preferably, a variant consensus according to this aspect of the invention exhibits a degree of sequence identity with the consensus sequence given above, of greater than 50%. More preferred polypeptides have degrees of identity of greater than 60%, 70%, 80%, 90%, 95%, 98% or 99%, respectively.

[0114] As discussed in detail below, fragments and functional equivalents of these proteins are included within the present invention, in addition to ligands that bind specifically to these proteins. Furthermore, the invention also embraces purified and isolated nucleic acid molecules encoding these proteins, fragments and functional equivalents, vectors containing such nucleic acid molecules and host cells transformed with these vectors. The therapeutic and diagnostic applications discussed above are also equally relevant to this aspect of the invention.

[0115] Semaphorin 4b

[0116] The polypeptide referred to above as that encoded by SEQ ID No 91 is a specific protein that is termed “Semaphorin 4b”. The gene encoding this protein is regulated (activated) by conditions of hypoxia. The Semaphorin 4b protein is encoded by a gene identified from the EST recited in SEQ ID No 92. The unequivocal and accurate full length cDNA sequence is provided herein as SEQ ID No 92a. The accurate presumptive amino acid sequence is provided herein as SEQ ID No 91. This protein, functionally-equivalent variants of this protein, the encoding nucleic acid molecules and ligands that regulate the activity and/or expression of this gene and protein are claimed above in the context of their role in hypoxia and hypoxia-related disorders.

[0117] Semaphorins are a large family of proteins, characterized by the 500 amino acid sema domain (Puschel et al., 1995, Neuron, 14(5): 941-8; Tamagnone and Comoglio, 2000, Trends Cell Biol., 10(9): 377-83). Early work showed a role in the guidance of axons during brain development, and the regulation of cell migration. More recently, specific members of this large family have been associated with cancer (Brambilla et al., Am J Pathol., 2000, 156(3): 939-50), rheumatoid arthritis (Mangasser-Stephan et al., Biochem Biophys Res Commun., 1997, 234(1): 153-6), the immune system (Spriggs, Curr Opin Immunol., 1999, 11(4): 387-91) including B-lymphocyte functions (Hall et al., Proc Natl Acad Sci U S A, 1996, 93(21): 11780-5) and angiogenesis (Miao et al., J Cell Biol., 1999, 146(1): 233-42). This is perhaps not surprising considering that cell migration/trafficking is a key part of inflammation, angiogenesis and tumour metastasis.

[0118] There are at least distinct 25 human semaphorin genes and the significance/utility of many of these remains untested. This includes the Semaphorin 4b protein, which is unpublished and until now has not been assigned a full and accurate amino acid sequence.

[0119] This aspect of the invention therefore provides a substantially purified semaphorin 4b polypeptide, which polypeptide:

[0120] i) comprises the amino acid sequence recited in SEQ ID NO: 91;

[0121] ii) has an amino acid sequence encoded by a nucleic acid sequence recited in SEQ ID NO: 92;

[0122] iii) is a fragment of a polypeptide according to i) or ii), provided that said fragment retains a biological activity possessed by the full length polypeptide of i) or ii), or has an antigenic determinant in common with the polypeptide of i) or ii); or

[0123] iv) is a functional equivalent of a polypeptide of i), ii) or (iii).

[0124] We have made experimental discoveries which link the expression of Semaphorin 4b to factors (hypoxia, gamma IFN and superoxide radicals) that are associated with a variety of human ischaemic and inflammatory diseases. In particular, a key response of cells to hypoxia is to stimulate angiogenesis, and a key part of inflammation is the recruitment and trafficking of immune cells. In light of our discoveries, and what is known about other specific members of the semaphorin family, it is herein proposed that Semaphorin 4b is a regulator of these cellular functions, and thus provides a novel target for therapeutic intervention. This paves the way for the development of therapeutic agents that either potentiate or antagonize functions of Semaphorin 4b. Such agents are likely to be highly valuable in the treatment of human disease.

[0125] PI3-kinase Adaptor Proteins

[0126] It has also been discovered that the polypeptide whose sequence is recited in SEQ ID NO: 527 is differentially regulated under physiological conditions of hypoxia. This polypeptide is postulated to be active as a PI-3-kinase adapter molecule. This polypeptide is referred to herein as Hu.BCAP-A. The polypeptide sequence recited in SEQ ID NO: 527 was, prior to the present disclosure, totally unknown in the literature and public sequence databases. Accordingly, until now, no biological function has been attributed to this polypeptide sequence. This aspect of the invention thus provides a substantially purified PI-3-kinase adapter polypeptide, which polypeptide:

[0127] i) comprises the amino acid sequence recited in SEQ ID NO: 527;

[0128] ii) has an amino acid sequence encoded by a nucleic acid sequence recited in SEQ ID NO: 528;

[0129] iii) is a fragment of a polypeptide according to i) or ii), provided that said fragment retains a biological activity possessed by the full length polypeptide of i) or ii), or has an antigenic determinant in common with the polypeptide of i) or ii); or

[0130] iv) is a functional equivalent of a polypeptide of i), ii) or (iii).

[0131] This gene was identified by screening a cDNA library derived from human peripheral blood mononuclear cells. Two cDNA clones corresponding to BCAP [clone GLB_{—}3 and clone GLB_{—}4] were isolated and Rapid Amplification of cDNA Ends (RACE) was performed on these clones to validate the full length sequence.

[0132] We have performed a detailed analysis of this new data, and compared it to a recent prediction of the human BCAP gene made by the human genome Ensembl project (www.ensembl.org/) (Ensembl predicted transcript accession ENST00000286061). The Ensembl gene prediction is equivalent in structure to the mouse sequence (NM_{—}031376), though is truncated at the 5′ end compared to the mouse sequence. The Ensembl gene prediction differs significantly from the Hu.BCAP-A gene and polypeptide sequences presented herein.

[0133] By analysing gene expression profiles using RNA prepared from different cell types in conjunction with proprietary nucleic acid arrays, the inventors have found that in hypoxic macrophages, the Hu.BCAP gene is expressed at 6-fold higher levels than the median expression level of this gene throughout other cell types such as adipocytes, cardiomyocytes, endothelial cells, fibroblast cells, hepatocyte cells, mammary epithelial cells, monocyte cells, neuroblastoma cells, renal epithelial cells, and skeletal muscle myocyte cells. These data were substantiated by analysing the same RNA samples using real time quantitative RT-PCR. The advantages of this latter method are that it is more sensitive and because two gene-specific primers are used, the data will be more specific to the gene in question.

[0134] Therefore, the levels of the encoded protein in hypoxic monocytes/macrophages, as found at various disease sites, are likely to be higher than in other cell types not involved in the disease process or present at the site of disease. This illuminates a novel utility of this gene as a target for the development of therapeutic products for diseases involving monocytes/macrophages and hypoxia. The clone initially identified by the inventors as corresponding to a gene that is overexpressed in certain tissues in response to hypoxia is IMAGE clone acc:R62339. Database searches for gene sequences showing identity with this IMAGE clone reveal that there are no matching human sequences of any type other than ESTs. This includes full length cDNAs, truncated cDNAs, gene sequences from chromosomal data or hypothetical protein gene sequences. Therefore the human gene represented by IMAGE clone acc:R62339 (Hu.BCAP) was deemed a novel human gene.

[0135] By comparison with mouse sequence data (acc AF293806), Hu.BCAP appears likely to encode a novel human Phosphoinositol 3-kinase (PI3-kinase) adapter molecule, homologous to the recently described mouse gene, BCAP. The human gene is neither present on GenBank or published elsewhere. The putative mouse equivalent of this gene has been published and is a known gene sequence named originally by Okada and colleagues as “BCAP” (Okada T, Maeda A, Iwamatsu A, Gotoh K, Kurosaki T. “BCAP: the tyrosine kinase substrate that connects B cell receptor to phosphoinositide 3-kinase activation”. Immunity. December 2000;13(6):817-27) (GenBank accession: NM_{—}031376). However, this and subsequent papers by the same authors indicate that BCAP only has physiological relevance in B-cells.

[0136] Protein components of the Phosphoinositol 3-kinase (PI3-kinase) signalling cascade, involved in intracellular signalling, have been implicated clearly as potential drug targets (see Stein RC et al, “PI3-kinase inhibition: a target for drug development” Mol Med Today. September 2000;6(9):347-57). PI3-kinases are a ubiquitously expressed enzyme family and, through the generation of phospholipid second messengers, are key to many cellular processes relevant to human disease, including proliferation, apoptosis and inflammation, motility, carbohydrate metabolism and intracellular protein sorting. These molecules are activated by receptor tyrosine kinases, src-like tyrosine kinases and viral oncoproteins. Studies of mutants that abrogate the binding of PI3-kinases to these molecules has indicated that PI3-kinases mediate mitogenic and cell motility responses of cells to growth factors and oncoproteins. As knowledge of their involvement in disease processes increases, the PI3-kinases and other components of the PI3-kinase signalling cascade appear to be an increasingly attractive target for drug development, particularly in the fields of cancer and other proliferative diseases, and in the treatment of inflammatory and immunological conditions. Evidence of the functional specialization of PI3-kinase isoforms suggests that selective inhibition with acceptable toxicity might be possible. Furthermore, there is evidence from mouse studies that functional ablation of BCAP is likely to have a clinically significant effect on inflammatory disease (Yamazaki et al 2002, J Exp Med 195(5):535-45).

[0137] The data presented for the Hu.BCAP gene thus provides evidence that the encoded protein is a novel drug target in humans, specifically targeting monocyte/macrophages at hypoxic disease sites.

[0138] In the publication referred to above relating to murine BCAP (Okada et al., 2000, Immunity, (6):817-27), the protein is identified as an adapter molecule connecting the non-receptor protein tyrosine kinase Syk to the p85 subunit of PI3-kinase, and therefore to the pivotal signalling pathways centred around PI3-kinase. The p85 subunit binds activated growth factor receptors and other tyrosine phosphorylated molecules through two Src homology 2 (SH2) domains (Hu et al., (1992) Mol. Cell. Biol. 12:981-990). Although, in Okada's report, Syk is acting as the intracellular signalling component of the B cell antigen receptor, which is present exclusively on B-cells, Syk has been shown to initiate intracellular signalling from other cell surface receptors which are expressed on macrophages, including the Fc gamma receptor, the chemokine receptor CCR5 and macrophage-expressed CD8 (Darby C et al “Stimulation of macrophage Fc gamma RIIIA activates the receptor-associated protein tyrosine kinase Syk and induces phosphorylation of multiple proteins including p95Vav and p62/GAP-associated protein”. J Immunol. 1994 152:5429-37; Kedzierska K et al “FcgammaR-mediated phagocytosis by human macrophages involves Hck, Syk, and Pyk2 and is augmented by GM-CSF.” J Leukoc Biol. August 2001;70(2):322-8; Ganju R K et al “Beta-chemokine receptor CCR5 signals through SHP1, SHP2, and Syk.” J Biol Chem. 2000 275:17263-8; Lin T J et al “Activation of macrophage CD8: pharmacological studies of TNF and IL-1 beta production.” J Immunol. 2000 164:1783-92.). A knock-out mouse has also been generated for BCAP (Yamazaki et al 2002, J Exp Med 195(5):535-45), and it was shown that this mouse knock-out has defective B-cell function.

[0139] Alteration of the levels or activity of Hu.BCAP-A and its functional equivalents is thus likely to be of considerable utility in modulating the activity of PI3-kinase. For example, disregulation of the signalling processes involved in cell cycle progression and intracellular protein sorting has detrimental effects, and it is therefore of great importance to understand and control these processes. Of course, this requires identifying the participants in the signalling events involved in these processes and elucidating their mechanism of function. The identification of Hu.BCAP-A and its functional equivalents as such a participant is thus of great importance for a wide range of diagnostic, therapeutic and screening applications. In particular, by knowing the structure of Hu-BCAP-A and its function in the PI3-kinase signalling cascade, it is possible to design compounds which affect this cascade, either by by activating an otherwise inactive pathway, or by inactivating an overly active pathway. Similarly, having identified Hu.BCAP-A as a participant in the PI3-kinase signalling cascade, it is also possible to identify situations in which that cascade is defective, resulting in a particular pathological state.

[0140] The novel discovery that Hu.BCAP-A and its functional equivalents are induced by hypoxia allows the development of regulators, such as small drug molecules, that affect the activity of these polypeptides, so allowing diseases and physiological conditions that are caused by hypoxia, or in which hypoxia has been implicated, to be treated. These discoveries also allow the development of diagnostic agents that are suitable for the detection of hypoxia in biological tissues and, through the identification of mutations and polymorphisms (such as SNPs) within genes coding for the proteins implicated herein, allows the assessment of an individual's risk of being susceptible to diseases and physiological conditions in which hypoxia is implicated.

[0141] The invention also includes functional equivalents of a PI3-kinase adaptor polypeptide of i), ii) or (iii) as recited above. A functionally-equivalent polypeptide according to this aspect of the invention may be a polypeptide that is homologous to a polypeptide whose sequence is explicitly recited herein. Two polypeptides are said to be “homologous” if the sequence of one of the polypeptides has a high enough degree of identity or similarity to the sequence of the other polypeptide. “Identity” indicates that at any particular position in the aligned sequences, the amino acid residue is identical between the sequences. “Similarity” indicates that, at any particular position in the aligned sequences, the amino acid residue is of a similar type between the sequences. Degrees of identity and similarity can be readily calculated according to methods known in the art (see, for example, Computational Molecular Biology, Lesk, A. M., ed., Oxford University Press, New York, 1988; Biocomputing. Informatics and Genome Projects, Smith, D. W., ed., Academic Press, New York, 1993).

[0142] Typically, greater than 50% identity between two polypeptides is considered to be an indication of functional equivalence, provided that either the biological activity of the polypeptide is retained or the polypeptides possess an antigenic determinant in common. Preferably, a functionally equivalent polypeptide according to this aspect of the invention exhibits a degree of sequence identity with a polypeptide sequence explicitly identified herein, or with a fragment thereof, of greater than 80%. More preferred polypeptides have degrees of identity of greater than 85%, 90%, 95%, 98%, 99% or more, respectively.

[0143] Functionally-equivalent polypeptides according to the invention are therefore intended to include natural biological variants (for example, allelic variants or geographical variations within the species from which the polypeptides are derived) and mutants (such as mutants containing amino acid substitutions, insertions or deletions) of the polypeptides whose sequences are explicitly recited herein. Such mutants may include polypeptides in which one or more of the amino acid residues are substituted with a conserved or non-conserved amino acid residue (preferably a conserved amino acid residue) and such substituted amino acid residue may or may not be one encoded by the genetic code. Typical such substitutions are among Ala, Val, Leu and Ile; among Ser and Thr; among the acidic residues Asp and Glu; among Asn and Gln; among the basic residues Lys and Arg; or among the aromatic residues Phe and Tyr.

[0144] Preferred functionally-equivalent polypeptides are variants in which several, i.e. between 5 and 10, 1 and 5, 1 and 3, 1 and 2 or just 1 amino acids are substituted, deleted or added in any combination. Especially preferred are silent substitutions, additions and deletions, which do not alter the properties and activities of the protein. Also especially preferred in this regard are conservative substitutions. “Mutant” polypeptides also include polypeptides in which one or more of the amino acid residues include a substituent group.

[0145] Particularly preferred functionally-equivalents of Hu.BCAP-A are splice variants of the full length Hu. BCAP-A gene. The inventors have identified that a splice variant of Hu.BCAP-A exists, herein termed Hu.BCAP-B. This polypeptide is encoded by an alternative transcript, formed by the splicing pattern of exons: 6, 7, 8, 9, 10, 11, 12, 13, 14, 15, 16, 17, 18, 19. This encodes a protein of 540 amino acids which is a truncated version of BCAP-A. This truncation in the encoded protein is not due to incomplete sequencing, but reflects a different exon usage. Novel functions and utilities are expected for BCAP-B, compared to BCAP-A and mouse BCAP. This splice variant thus forms a preferred functional equivalent of the Hu.BCAP-A polypeptide referred to above.

[0146] This aspect of the first embodiment of the invention thus provides a substantially purified PI-3-kinase adapter polypeptide, which polypeptide:

[0147] i) comprises the amino acid sequence recited in SEQ ID NO: 529;

[0148] ii) has an amino acid sequence encoded by a nucleic acid sequence recited in SEQ ID NO: 530;

[0149] iii) is a fragment of a polypeptide according to i) or ii), provided that said fragment retains a biological activity possessed by the full length polypeptide of i) or ii), or has an antigenic determinant in common with the polypeptide of i) or ii); or

[0150] iv) is a functional equivalent of a polypeptide of i), ii) or (iii).

[0151] The polypeptide sequence recited in SEQ ID NO: 529 was, prior to the present disclosure, totally unknown in the literature and public sequence databases. Accordingly, until now, no biological function has been attributed to this polypeptide sequence. The inventors have now elucidated a biological function for this polypeptide, in that it has been found to be differentially regulated under physiological conditions of hypoxia. This polypeptide is postulated to be active as a PI-3-kinase adapter molecule. Although the Applicant does not wish to be bound by this theory, since this splice variant is truncated at the N-terminus and therefore lacks the portion of the protein responsible for binding to tyrosine kinases such as Syk, this variant may inhibit PI3-kinase signalling by binding to p85.

[0152] The inventors have identified that a further splice variant of Hu.BCAP-A exists, herein termed Hu.BCAP-C. This variant is a further example of a functional equivalent of the Hu.BCAP-A polypeptide referred to above. This variant is formed by the splicing pattern of exons: 1, 2, 3, 4, 7, 8, 9, 10, 11, 12, 13, 14, 15, 16, 17, 18, 19. This encodes a 228aa polypeptide which, as well as being shorter than BCAP-A, also contains novel amino acid sequence derived from exon 3. Furthermore, as a result of exon 4 being directly spliced to exon 7 (rather than to exon 5 as found in BCAP-A) a frameshift is introduced and a small tail of 8 residues is created prior to reaching the first stop codon of this new frame. Agai,n BCAP-C is expected to have novel functions and utilities.

[0153] A third aspect of the first embodiment of the invention thus provides a substantially purified PI-3-kinase adapter polypeptide, which polypeptide:

[0154] i) comprises the amino acid sequence recited in SEQ ID NO: 531;

[0155] ii) has an amino acid sequence encoded by a nucleic acid sequence recited in SEQ ID NO: 532;

[0156] iii) is a fragment of a polypeptide according to i) or ii), provided that said fragment retains a biological activity possessed by the full length polypeptide of i) or ii), or has an antigenic determinant in common with the polypeptide of i) or ii); or

[0157] iv) is a functional equivalent of a polypeptide of i), ii) or (iii).

[0158] The polypeptide sequence recited in SEQ ID NO: 531 was, prior to the present disclosure, totally unknown in the literature and public sequence databases. Accordingly, until now, no biological function has been attributed to this polypeptide sequence. The inventors have now elucidated a biological function for this polypeptide, in that it has been found to be differentially regulated under physiological conditions of hypoxia. This polypeptide is postulated to be active as a PI-3-kinase adapter molecule. Although the Applicant does not wish to be bound by this theory, since this splice variant is truncated at the N-terminus and therefore lacks the portion of the protein responsible for binding to tyrosine kinases such as Syk, this variant may inhibit PI3-kinase signalling by binding to p85.

[0159] A simple alignment of the polypeptides encoded by Hu.BCAP-A, Hu.BCAP-B and Hu.BCAP-C reveals the differences indicated below. Residues that differ from Hu.BCAP-A are shown in bold.

| | |
|---|---|
| Hu.BCAP-B | ---------- ---------- ---------- ---------- ---------- |
| Hu.BCAP-A | MAASGVPRGC DILIVYSPDA EEWCQYLQTL FLSSRQVRSQ KILTHRLGPE |
| Hu.BCAP-C | MAASGVPRGC DILIVYSPDA EEWCQYLQTL FLSSRQVRSQ KILTHRLGPE |
| Hu.BCAP-B | ---------- ---------- ---------- ---------- ---------- |
| Hu.BCAP-A | ASFSAEDLSL FLSTRCVVVL LSAELVQHFH KPALLPLLQR AFHPPHRVVR |
| Hu.BCAP-C | ASFSAEDLSL FLSTRCVVVL LSAELVQHFH KPALLPLLQR AFHPPHRVVR |
| Hu.BCAP-B | ---------- ---------- ---------- ---------- ---------- |
| Hu.BCAP-A | LLCGVRDSEE FLDFFPDWAH WQELTCDDEP ETYVAAVKKA ISE------- |
| Hu.BCAP-C | LLCGVRDSEE FLDFFPDWAH WQELTCDDEP ETYVAAVKKA ISEETASHNA |
| Hu.BCAP-B | ---------- ---------- ---------- ---------- ---------- |
| Hu.BCAP-A | ---------- ---------- ----DSGCDS VTDTEPEDEK VVSYSKQQNL |
| Hu.BCAP-C | AQAGLKLLSS SNPPDSASQS TWITDSGCDS VTDTEPEDEK VVSYSKQQNL |
| Hu.BCAP-B | ---------- ---------- ---------- ---------- ---------- |
| Hu.BCAP-A | PTVTSPGNLM VVQPDRIRCG --------AE TTVYVIVRCK LDDRVATEAE |
| Hu.BCAP-C | PTVTSPGNLM VVQPDRIRCG TFHLGTFL-- ---------- ---------- |
| Hu.BCAP-B | ---------- ---------- ---------- ---------- ---------- |
| Hu.BCAP-A | FSPEDSPSVR MEAKVENEYT ISVKAPNLSS GNVSLKIYSG DLVVCETVIS |
| Hu.BCAP-C | ---------- ---------- ---------- ---------- ---------- |
| Hu.BCAP-B | ----MEEIGN LLSNAANPVE FMCQAFKIVP YNTETLDKLL TESLKNNIPA |
| Hu.BCAP-A | YYTDMEEIGN LLSNAANPVE FMCQAFKIVP YNTETLDKLL TESLKNNIPA |
| Hu.BCAP-C | ---------- ---------- ---------- ---------- ---------- |
| Hu.BCAP-B | SGLHLFGINQ LEEEDMMTNQ RDEELPTLLH FAAKYGLKNL TALLLTCPGA |
| Hu.BCAP-A | SGLHLFGINQ LEEEDMMTNQ RDEELPTLLH FAAKYGLKNL TALLLTCPGA |
| Hu.BCAP-C | ---------- ---------- ---------- ---------- ---------- |
| Hu.BCAP-B | LQAYSVANKH GHYPNTIAEK HGFRDLRQFI DEYVETVDML KSHIKEELMH |
| Hu.BCAP-A | LQAYSVANKH GHYPNTIAEK HGFRDLRQFI DEYVETVDML KSHIKEELMH |
| Hu.BCAP-C | ---------- ---------- ---------- ---------- ---------- |
| Hu.BCAP-B | GEEADAVYES MAHLSTDLLM KCSLNPGCDE DLYESMAAFV PAATEDLYVE |
| Hu.BCAP-A | GEEADAVYES MAHLSTDLLM KCSLNPGCDE DLYESMAAFV PAATEDLYVE |
| Hu.BCAP-C | ---------- ---------- ---------- ---------- ---------- |
| Hu.BCAP-B | MLQASTSNPI PGDGFSRATK DSMIRKFLEG NSMGMTNLER DQCHLGQEED |
| Hu.BCAP-A | MLQASTSNPI PGDGFSRATK DSMIRKFLEG NSMGMTNLER DQCHLGQEED |
| Hu.BCAP-C | ---------- ---------- ---------- ---------- ---------- |
| Hu.BCAP-B | VYHTVDDDEA FSVDLASRPP VPVPRPETTA PGAHQLPDNE PYIFKVFAEK |
| Hu.BCAP-A | VYHTVDDDEA FSVDLASRPP VPVPRPETTA PGAHQLPDNE PYIFKVFAEK |
| Hu.BCAP-C | ---------- ---------- ---------- ---------- ---------- |
| Hu.BCAP-B | SQERPGNFYV SSESIRKGPP VRPWRDRPQS SIYDPFAGMK TPGQRQLITL |
| Hu.BCAP-A | SQERPGNFYV SSESIRKGPP VRPWRDRPQS SIYDPFAGMK TPGQRQLITL |
| Hu.BCAP-C | ---------- ---------- ---------- ---------- ---------- |
| Hu.BCAP-B | QEQVKLGIVN VDEAVLHFKE WQLNQKKRSE SFRFQQENLK RLRDSITRRQ |
| Hu.BCAP-A | QEQVKLGIVN VDEAVLHFKE WQLNQKKRSE SFRFQQENLK RLRDSITRRQ |
| Hu.BCAP-C | ---------- ---------- ---------- ---------- ---------- |
| Hu.BCAP-B | REKQKSGKQT DLEITVPIRH SQHLPAKVEF GVYESGPRKS VIPPRTELRR |
| Hu.BCAP-A | REKQKSGKQT DLEITVPIRH SQHLPAKVEF GVYESGPRKS VIPPRTELRR |
| Hu.BCAP-C | ---------- ---------- ---------- ---------- ---------- |
| Hu.BCAP-B | GDWKTDSTSS TASSTSNRSS TRSLLSVSSG MEGDNEDNEV PEVTRSRSPG |
| Hu.BCAP-A | GDWKTDSTSS TASSTSNRSS TRSLLSVSSG MEGDNEDNEV PEVTRSRSPG |
| Hu.BCAP-C | ---------- ---------- ---------- ---------- ---------- |
| Hu.BCAP-B | PPQVDGTPTM SLERPPRVPP RAASQRPPTR ETFHPPPPVP PRGR |
| Hu.BCAP-A | PPQVDGTPTM SLERPPRVPP RAASQRPPTR ETFHPPPPVP PRGR |
| Hu.BCAP-C | ---------- ---------- ---------- ---------- ---------- |

[0160] The novel exon “ETASHNAAQAGLKLLSSSNPPDSASQSTWIT” shares homology with the Alu subfamily of repeats, but has no homology with any other protein domain.

[0161] Both the Hu.BCAP-A and B variants contain a conserved repeat region that shows homology to the ankyrin repeat (shown italicised). This repeat is thought to be involved in protein-protein interactions. In view of the predicted function of Hu.BCAP-A and its functional equivalents, it is considered likely that this protein will form oligomers with tyrosine kinase proteins such as Syk and/or PI3-kinase proteins, particularly the p85 subunit of a PI3-kinase. A further embodiment of this aspect of the invention thus provides a polypeptide complex comprising a Hu.BCAP-A polypeptide or a functional equivalent thereof, a tyrosine kinase protein, and/or a PI3-kinase protein. Preferred tyrosine kinase proteins include the non-receptor tyrosine kinase Syk and its functional equivalents, and the p85 subunit of a PI3-kinase protein.

[0162] Polypeptides of the above aspects of the invention are intended to include fragments of polypeptides according to i) or ii) as defined above, provided that the fragment retains a biological activity that is possessed by the full length polypeptide of i) or ii), or has an antigenic determinant in common with the polypeptide of i) or ii). As used herein, the term “fragment” refers to a polypeptide having an amino acid sequence that is the same as part, but not all, of an amino acid sequence as recited in any one of SEQ ID NOS: 1, 3, 5, 7, 9, 11, 13, 15, 17, 19, 21, 23, 25, 27, 29, 31, 33, 35, 37, 39, 41, 43, 45, 47, 49, 51, 53, 55, 57, 59, 63, 67, 69, 73, 75, 77, 85, 85a, 87, 89, 91, 93, 95, 99, 103, 113, 115, 119, 121, 129, 131, 133, 137, 139, 141, 145, 151, 153, 157, 159, 163, 169, 181, 187, 201, 205, 207, 209, 527, 529 and 531, an amino acid sequence that is encoded by a nucleic acid sequence recited in any one of SEQ ID NOS 62, 64, 66, 68, 70, 72, 74, 76, 78, 80, 82, 84, 86, 86a, 88, 90, 90a, 92, 92a, 94, 96, 98, 100, 102, 104, 106, 108, 110, 112, 114, 116, 118, 120, 122, 124, 126, 128, 130, 132, 134, 136, 138, 140, 142, 144, 146, 148, 150, 152, 154, 156, 158, 160, 162, 164, 166, 168, 170, 172, 174, 176, 178, 180, 182, 184, 186, 188, 190, 192, 194, 196, 198, 200, 202, 204, 206, 208, 210, 212, 214, 216, 528, 530 and 532, or an amino acid sequence that is encoded by a gene that is linked to a nucleic acid sequence recited in any one of these SEQ ID NOS. The fragments should comprise at least n consecutive amino acids from the sequence and, depending on the particular sequence, n preferably is 7 or more (for example, 8, 10, 12, 14, 16, 18, 20 or more). Small fragments may form an antigenic determinant.

[0163] Such fragments may be isolated fragments, that are not part of or fused to other amino acids or polypeptides, or they may be comprised within a larger polypeptide, of which they form a part or region. When comprised within a larger polypeptide, a fragment of the invention most preferably forms a single continuous region. For instance, certain preferred embodiments relate to a fragment having a pre- and/or pro-polypeptide region fused to the amino terminus of the fragment and/or an additional region fused to the carboxyl terminus of the fragment. However, several fragments may be comprised within a single larger polypeptide.

[0164] The polypeptides of the present invention or their immunogenic fragments (comprising at least one antigenic determinant) can be used to generate ligands, such as polyclonal or monoclonal antibodies, that are immunospecific for the polypeptides. Such antibodies may be employed to isolate or to identify clones that express a polypeptide according to the invention or, for example, to purify the polypeptide by affinity chromatography. Such antibodies may also be employed as diagnostic or therapeutic aids, amongst other applications, as will be apparent to the skilled reader.

[0165] The term “immunospecific” means that an antibody has substantially greater affinity for a polypeptide according to the invention than their affinity for related polypeptides. As used herein, the term “antibody” is intended to include intact molecules as well as fragments thereof, such as Fab, F(ab′)₂, scFv, including intrabodies, which are capable of binding to the antigenic determinant in question.

[0166] The invention also includes functional equivalents of a polypeptide of i), ii) or (iii) as recited above. A functionally-equivalent polypeptide according to this aspect of the, invention may be a polypeptides that is homologous to a polypeptide whose sequence is explicitly recited herein. Two polypeptides are said to be “homologous” if the sequence of one of the polypeptides has a high enough degree of identity or similarity to the sequence of the other polypeptide for the skilled person to determine that they are similar in origin and function. Preferably, homology is used to refer to sequence identity. “Identity” indicates that at any particular position in the aligned sequences, the amino acid residue is identical between the sequences. “Similarity” indicates that, at any particular position in the aligned sequences, the amino acid residue is of a similar type between the sequences. Degrees of identity and similarity can be readily calculated according to methods known in the art (see, for example, Computational Molecular Biology, Lesk, A. M., ed., Oxford University Press, New York, 1988; Biocomputing. Informatics and Genome Projects, Smith, D. W., ed., Academic Press, New York, 1993). Advantageously, the BLAST algorithm is employed, with parameters set to default values. The BLAST algorithm is described in detail at http address www.ncbi.nih.gov/BLAST/blast_help.html, which is incorporated herein by reference. The search parameters are defined as follows, and are advantageously set to the defined default parameters.

[0167] Advantageously, “substantial homology” when assessed by BLAST equates to sequences which match with an EXPECT value of at least about 7, preferably at least about 9 and most preferably 10 or more. The default threshold for EXPECT in BLAST searching is usually 10.

[0168] BLAST (Basic Local Alignment Search Tool) is the heuristic search algorithm employed by the programs blastp, blastn, blastx, tblastn, and tblastx; these programs ascribe significance to their findings using the statistical methods of Karlin and Altschul (see http address www.ncbi.nih.gov/BLAST/blast_help.html) with a few enhancements. The BLAST programs were tailored for sequence similarity searching, for example to identify homologues to a query sequence. The programs are not generally useful for motif-style searching. For a discussion of basic issues in similarity searching of sequence databases, see Altschul et al. (1994) Nature Genetics 6:119-129.

[0169] The five BLAST programs available at http address www.ncbi.nlm.nih.gov perform the following tasks:

[0170] blastp compares an amino acid query sequence against a protein sequence database;

[0171] blastn compares a nucleotide query sequence against a nucleotide sequence database;

[0172] blastx compares the six-frame conceptual translation products of a nucleotide query sequence (both strands) against a protein sequence database;

[0173] tblastn compares a protein query sequence against a nucleotide sequence database dynamically translated in all six reading frames (both strands).

[0174] tblastx compares the six-frame translations of a nucleotide query sequence against the six-frame translations of a nucleotide sequence database.

[0175] BLAST uses the following search parameters:

[0176] HISTOGRAM Display a histogram of scores for each search; default is yes. (See parameter H in the BLAST Manual).

[0177] DESCRIPTIONS Restricts the number of short descriptions of matching sequences reported to the number specified; default limit is 100 descriptions. (See parameter V in the manual page). See also EXPECT and CUTOFF.

[0178] ALIGNMENTS Restricts database sequences to the number specified for which high-scoring segment pairs (HSPs) are reported; the default limit is 50. If more database sequences than this happen to satisfy the statistical significance threshold for reporting (see EXPECT and CUTOFF below), only the matches ascribed the greatest statistical significance are reported. (See parameter B in the BLAST Manual).

[0179] EXPECT The statistical significance threshold for reporting matches against database sequences; the default value is 10, such that 10 matches are expected to be found merely by chance, according to the stochastic model of Karlin and Altschul (1990). If the statistical significance ascribed to a match is greater than the EXPECT threshold, the match will not be reported. Lower EXPECT thresholds are more stringent, leading to fewer chance matches being reported. Fractional values are acceptable. (See parameter E in the BLAST Manual).

[0180] CUTOFF Cutoff score for reporting high-scoring segment pairs. The default value is calculated from the EXPECT value (see above). HSPs are reported for a database sequence only if the statistical significance ascribed to them is at least as high as would be ascribed to a lone HSP having a score equal to the CUTOFF value. Higher CUTOFF values are more stringent, leading to fewer chance matches being reported. (See parameter S in the BLAST Manual). Typically, significance thresholds can be more intuitively managed using EXPECT.

[0181] MATRIX Specify an alternate scoring matrix for BLASTP, BLASTX, TBLASTN and TBLASTX. The default matrix is BLOSUM62 (Henikoff & Henikoff, 1992). The valid alternative choices include: PAM40, PAM120, PAM250 and IDENTITY. No alternate scoring matrices are available for BLASTN; specifying the MATRIX directive in BLASTN requests returns an error response.

[0182] STRAND Restrict a TBLASTN search to just the top or bottom strand of the database sequences; or restrict a BLASTN, BLASTX or TBLASTX search to just reading frames on the top or bottom strand of the query sequence.

[0183] FILTER Mask off segments of the query sequence that have low compositional complexity, as determined by the SEG program of Wootton & Federhen (1993) Computers and Chemistry 17:149-163, or segments consisting of short-periodicity internal repeats, as determined by the XNU program of Claverie & States (1993) Computers and Chemistry 17:191-201, or, for BLASTN, by the DUST program of Tatusov and Lipman (see http address www.ncbi.nlm.nih.gov). Filtering can eliminate statistically significant but biologically uninteresting reports from the blast output (e.g., hits against common acidic-, basic- or proline-rich regions), leaving the more biologically interesting regions of the query sequence available for specific matching against database sequences.

[0184] Low complexity sequence found bywa filter program is substituted using the letter “N” in nucleotide sequence (e.g., “NNNNNNNNNNNNN”) and the letter “X” in protein sequences (e.g., “XXXXXXXXX”).

[0185] Filtering is only applied to the query sequence (or its translation products), not to database sequences. Default filtering is DUST for BLASTN, SEG for other programs.

[0186] It is not unusual for nothing at all to be masked by SEG, XNU, or both, when applied to sequences in SWISS-PROT, so filtering should not be expected to always yield an effect. Furthermore, in some cases, sequences are masked in their entirety, indicating that the statistical significance of any matches reported against the unfiltered query sequence should be suspect.

[0187] NCBI-gi Causes NCBI gi identifiers to be shown in the output, in addition to the accession and/or locus name.

[0188] Most preferably, sequence comparisons are conducted using the simple BLAST search algorithm provided at http address www.ncbi.nlm.nih.gov/BLAST.

[0189] Alternatively, sequence homology may be determined by algorithms such as FastA, available at http address biology.ncsa.uiuc.edu/BW30/BW.cgi. FastA is considered to be superior to BLAST for alignment of short sequences. Advantageously, the FastA algorithm is employed using default parameters at http address biology.ncsa.uiuc.edu/BW30/BW.cgi.

[0190] Typically, greater than 50% identity between two polypeptides is considered to be an indication of functional equivalence, provided that either the biological activity of the polypeptide is retained or the polypeptides possess an antigenic determinant in common. Preferably, a functionally equivalent polypeptide according to this aspect of the invention exhibits a degree of sequence identity with a polypeptide sequence explicitly identified herein, or with a fragment thereof, of greater than 50%. More preferred polypeptides have degrees of identity of greater than 60%, 70%, 80%, 90%, 95%, 98% or 99%, respectively.

[0191] Functionally-equivalent polypeptides according to the invention are therefore intended to include natural biological variants (for example, allelic variants or geographical variations within the species from which the polypeptides are derived) and mutants (such as mutants containing amino acid substitutions, insertions or deletions) of the polypeptides whose sequences are explicitly recited herein. Such mutants may include polypeptides in which one or more of the amino acid residues are substituted with a conserved or non-conserved amino acid residue (preferably a conserved amino acid residue) and such substituted amino acid residue may or may not be one encoded by the genetic code. Typical such substitutions are among Ala, Val, Leu and Ile; among Ser and Thr; among the acidic residues Asp and Glu; among Asn and Gln; among the basic residues Lys and Arg; or among the aromatic residues Phe and Tyr.

[0192] Particularly preferred are variants in which several, i.e. between 5 and 10, 1 and 5, 1 and 3, 1 and 2 or just 1 amino acids are substituted, deleted or added in any combination. Especially preferred are silent substitutions, additions and deletions, which do not alter the properties and activities of the protein. Also especially preferred in this regard are conservative substitutions. “Mutant” polypeptides also include polypeptides in which one or more of the amino acid residues include a substituent group.

[0193] As discussed above, using a method according to the above-described aspects of the invention it has now been discovered, most surprisingly, that the response to hypoxia differs between different specialized cell types or between different physiological states of the same cell type. For example, it has been found that in macrophage cells, different polypeptides are induced/repressed during different physiological states. Furthermore, it has been found that a subset of this group of polypeptides are regulated only in activated macrophage cells. Macrophages possess various biological activities, including cytotoxic effects towards tumour cells and phagocytosis of bacteria or cellular debris. These form an important and potent arm of innate immunity, and as such must be finely regulated. In the absence of interactions with pathogens or other immune cells, the aforementioned activities of the macrophage are greatly reduced (i.e. resting macrophages). When given appropriate stimuli, such as contact with the lipopolysaccharide surface of bacteria, and/or exposure to T-cell derived interferon gamma, the functional activities of the macrophage are greatly potentiated (i.e. activated macrophage).

[0194] The expression of a further subset of these polypeptides has been found herein to be induced in activated macrophages under conditions of hypoxia, whilst a still further subset has been found herein to be repressed in activated macrophages under conditions of hypoxia.

[0195] In resting macrophage cells, it has been found that different polypeptides are induced/repressed during the biological response to hypoxia. For example, it has been found that a subset of this group of polypeptides are regulated only in resting macrophage cells. The expression of a further subset of these polypeptides has been found herein to be induced in resting macrophages under conditions of hypoxia, whilst a still further subset has been found herein to be repressed in resting macrophages under conditions of hypoxia.

[0196] According to a further aspect of the invention, there is provided a purified and isolated nucleic acid molecule that encodes a polypeptide according to any one of the aspects of the invention discussed above. Such a nucleic acid molecule may consist of the nucleic acid sequence as recited in any one of SEQ ID NOS 2, 4, 6, 8, 10, 12, 14, 16, 18, 20, 22, 24, 26, 28, 30, 32, 34, 36, 38, 40, 42, 44, 46, 48, 50, 52, 54, 56, 58, 60, 62, 64, 66, 68, 70, 72, 74, 76, 78, 80, 82, 84, 86, 86a, 88, 90, 90a, 92, 92a, 94, 96, 98, 100, 102, 104, 106, 108, 110, 112, 114, 116, 118, 120, 122, 124, 126, 128, 130, 132, 134, 136, 138, 140, 142, 144, 146, 148, 150, 152, 154, 156, 158, 160, 162, 164, 166,168, 170, 172, 174, 176, 178, 180, 182, 184, 186, 188, 190, 192, 194, 196, 198, 200, 202, 204, 206, 208, 210, 212, 214, 216, 528, 530 and 532, or form a redundant equivalent or fragment thereof. This aspect of the invention also includes a purified nucleic acid molecule which hydridizes under high stringency conditions with a nucleic acid molecule as described above.

[0197] According to a further aspect of the invention, there is provided an expression vector that contains a purified and isolated nucleic acid molecule according to the aspects of the invention described above. The invention also incorporates a delivery vehicle, such as a liposome, comprising a nucleic acid according to the above-described aspects of the invention.

[0198] In a further aspect, the invention provides a host cell transformed with a vector of the above-described aspect of the invention.

[0199] In a still further aspect, the invention provides a ligand that binds specifically to a polypeptide according to the above-described aspects of the invention. The ligand may be an antagonist ligand that inhibits the biological activity of the polypeptide, or may be an agonist ligand that activates the hypoxia-induced activity of the polypeptide to augment or potentiate a hypoxia-induced activity.

[0200] In a still further aspect of the invention, there is provided a ligand which binds specifically to, and which preferably inhibits the hypoxia-induced activity of, a polypeptide according to any one of the above-described aspects of the invention. Such a ligand may, for example, be an antibody or intrabody that is immunospecific for the polypeptide in question.

[0201] According to a further aspect, the invention provides a polypeptide, a nucleic acid molecule, vector, host cell or ligand as described above, for use in therapy or diagnosis of a disease or abnormal physiological condition. Preferably, the disease or abnormal physiological condition that is affected by hypoxia; examples of such diseases include cancer, ischaemic conditions (such as stroke, coronary arterial disease, peripheral arterial disease), reperfusion injury, retinopathy, neonatal stress, preeclapmsia, atherosclerosis, inflammatory conditions (including rheumatoid arthritis), hair loss and wound healing. The undesired celluar process involved in said diseases might include, but is not restricted to; tumorigenesis, angiogenesis, apoptosis, inflammation or erythropoiesis. The undesired biochemical processes involved in said cellular processes might include, but is not restricted to, glycolysis, gluconeogenesis, glucose transportation, catecholamine synthesis, iron transport or nitric oxide synthesis.

[0202] According to the invention, a number of known proteins have also been implicated in the biological response to hypoxia. The functions of these proteins are known, meaning that these functions have been annotated in the public databases. The sequences of these proteins are presented in SEQ ID NOS: 217, 219, 221, 223, 225, 227, 229, 231, 233, 235, 237, 239, 241, 243, 245, 247, 249, 251, 253, 255, 257, 259, 261, 263, 265, 267, 269, 271, 273, 275, 277, 279, 281, 283, 285, 287, 289, 291, 293, 295, 297, 299, 301, 303, 305, 307, 309, 311, 313, 315, 317, 319, 321, 323, 325, 327, 329, 331, 333, 335, 337, 339, 341, 343, 345, 347, 349, 351, 353, 355, 357, 359, 361, 363, 365, 367, 369, 371, 373, 375, 377, 379, 381, 383, 385, 387, 389, 391, 393, 395, 397, 399, 401, 403, 405, 407, 409, 411, 413, 415, 417, 419, 421, 423, 425, 427, 429, 431, 433, 435, 437, 439, 441, 443, 445, 447, 449, 451, 453, 455, 457, 459, 461, 463, 465, 467, 469, 471, 473, 475, 477, 479, 481, 483, 485 and 487.

[0203] According to a further aspect of the invention, there is provided a substantially purified polypeptide, which polypeptide:

[0204] i) comprises the amino acid sequence as recited in any one of SEQ ID NOS: 1, 3, 5, 7, 9, 11, 13, 15, 17, 19, 21, 23, 25, 27, 29, 31, 33, 35, 37, 39, 41, 43, 45, 47, 49, 51, 53, 55, 57, 59, 63, 67, 69, 73, 75, 77, 85, 85a, 87, 89, 91, 93, 95, 99, 103, 113, 115, 119, 121, 129, 131, 133, 137, 139, 141, 145, 151, 153, 157, 159, 163, 169, 181, 187, 201, 205, 207, 209, 527, 529 or 531 or any one of SEQ ID NOS: 217, 219, 221, 223, 225, 227, 229, 231, 233, 235, 237, 239, 241, 243, 245, 247, 249, 251, 253, 255, 257, 259, 261, 263, 265, 267, 269, 271, 273, 275, 277, 279, 281, 283, 285, 287, 289, 291, 293, 295, 297, 299, 301, 303, 305, 307, 309, 311, 313, 315, 317, 319, 321, 323, 325, 327, 329, 331, 333, 335, 337, 339, 341, 343, 345, 347, 349, 351, 353, 355, 357, 359, 361, 363, 365, 367, 369, 371, 373, 375, 377, 379, 381, 383, 385, 387, 389, 391, 393, 395, 397, 399, 401, 403, 405, 407, 409, 411, 413, 415, 417, 419, 421, 423, 425, 427, 429, 431, 433, 435, 437, 439, 441, 443, 445, 447, 449, 451, 453, 455, 457, 459, 461, 463, 465, 467, 469, 471, 473, 475, 477, 479, 481, 483, 485, 487, 489 and 491;

[0205] ii) has an amino acid sequence encoded by a nucleic acid sequence recited in any one of SEQ ID NOS: 62, 64, 66, 68, 70, 72, 74, 76, 78, 80, 82, 84, 86, 86a, 88, 90, 90a, 92, 92a, 94, 96, 98, 100, 102, 104, 106, 108, 110, 112, 114, 116, 118, 120, 122, 124, 126, 128, 130, 132, 134, 136, 138, 140, 142, 144, 146, 148, 150, 152, 154, 156, 158, 160, 162, 164, 166, 168, 170, 172, 174, 176, 178, 180, 182, 184, 186, 188, 190, 192, 194, 196, 198, 200, 202, 204, 206, 208, 210, 212, 214, 216, 528, 530 and 532, or encoded by a gene identified from an EST recited in any one of these SEQ ID NOS;

[0206] iii) is a fragment of a polypeptide according to i) or ii), provided that said fragment retains a biological activity possessed by the full length polypeptide of i) or ii), or has an antigenic determinant in common with the polypeptide of i) or ii); or

[0207] iv) is a functional equivalent of a polypeptide of i), ii) or (iii);

[0208] for use in the diagnosis or therapy of tumourigenesis, angiogenesis, apoptosis, the biological response to hypoxia conditions, or a hypoxic-associated pathology.

[0209] The invention also provides a purified and isolated nucleic acid molecule that encodes a polypeptide according to this aspect of the invention, for use in the diagnosis or therapy of tumourigenesis, angiogenesis, apoptosis, the biological response to hypoxia conditions, or a hypoxic-associated pathology. The sequences of these molecules are provided in SEQ ID NOS: 218, 220, 222, 224, 226, 228, 230, 232, 234, 236, 238, 240, 242, 244, 246, 248, 250, 252, 254, 256, 258, 260, 262, 264, 266, 268, 270, 272, 274, 276, 278, 280, 282, 284, 286, 288, 290, 292, 294, 296, 298, 300, 302, 304, 306, 308, 310, 312, 314, 316, 318, 320, 322, 324, 326, 328, 330, 332, 334, 336, 338, 340, 342, 344, 346, 348, 350, 352, 354, 356, 358, 360, 362, 364, 366, 368, 370, 372, 374, 376, 378, 380, 382, 384, 386, 388, 390, 392, 394, 396, 398, 400, 402, 404, 406, 408, 410, 412, 414, 416, 418, 420, 422, 424, 426, 428, 430, 432, 434, 436, 438, 440, 442, 444, 446, 448, 450, 452, 454, 456, 458, 460, 462, 464, 466, 468, 470, 472, 474, 476, 478, 480, 482, 484, 486 and 488. As described above for the EST nucleic acid sequences annotated herein, this aspect of the invention includes redundant equivalents and fragments of the sequences explicitly recited in SEQ ID NOS: 218, 220, 222, 224, 226, 228, 230, 232, 234, 236, 238, 240, 242, 244, 246, 248, 250, 252, 254, 256, 258, 260, 262, 264, 266, 268, 270, 272, 274, 276, 278, 280, 282, 284, 286, 288, 290, 292, 294, 296, 298, 300, 302, 304, 306, 308, 310, 312, 314, 316, 318, 320, 322, 324, 326, 328, 330, 332, 334, 336, 338, 340, 342, 344, 346, 348, 350, 352, 354, 356, 358, 360, 362, 364, 366, 368, 370, 372, 374, 376, 378, 380, 382, 384, 386, 388, 390, 392, 394, 396, 398, 400, 402, 404, 406, 408, 410, 412, 414, 416, 418, 420, 422, 424, 426, 428, 430, 432, 434, 436, 438, 440, 442, 444, 446, 448, 450, 452, 454, 456, 458, 460, 462, 464, 466, 468, 470, 472, 474, 476, 478, 480, 482, 484, 486 and 488, and purified nucleic acid molecules which hybridize under high stringency conditions with such nucleic acid molecules, and vectors containing such nucleic acid molecules for use in the diagnosis or therapy of tumourigenesis, angiogenesis, apoptosis, the biological response to hypoxia conditions, or a hypoxic-associated pathology.

[0210] This aspect of the invention also includes ligands which bind specifically to, and which preferably inhibit the hypoxia-induced activity of, a polypeptide listed in SEQ ID NOS: 217, 219, 221, 223, 225, 227, 229, 231, 233, 235, 237, 239, 241, 243, 245, 247, 249, 251, 253, 255, 257, 259, 261, 263, 265, 267, 269, 271, 273, 275, 277, 279, 281, 283, 285, 287, 289, 291, 293, 295, 297, 299, 301, 303, 305, 307, 309, 311, 313, 315, 317, 319, 321, 323, 325, 327, 329, 331, 333, 335, 337, 339, 341, 343, 345, 347, 349, 351, 353, 355, 357, 359, 361, 363, 365, 367, 369, 371, 373, 375, 377, 379, 381, 383, 385, 387, 389, 391, 393, 395, 397, 399, 401, 403, 405, 407, 409, 411, 413, 415, 417, 419, 421, 423, 425, 427, 429, 431, 433, 435, 437, 439, 441, 443, 445, 447, 449, 451, 453, 455, 457, 459, 461, 463, 465, 467, 469, 471, 473, 475, 477, 479, 481, 483, 485 and 487, for use in the diagnosis or therapy of tumourigenesis, angiogenesis, apoptosis, the biological response to hypoxia conditions, or a hypoxic-associated pathology.

[0211] The invention also provides a pharmaceutical composition suitable for modulating hypoxia and/or ischaemia, comprising a therapeutically-effective amount of a polypeptide, a nucleic acid molecule, vector or ligand as described above, in conjunction with a pharmaceutically-acceptable carrier.

[0212] The invention also provides a vaccine composition comprising a polypeptide, or a nucleic acid molecule as described above.

[0213] The invention also provides a method of treating a disease in a patient in need of such treatment by administering to a patient a therapeutically effective amount of a polypeptide, a nucleic acid molecule, vector, ligand or pharmaceutical composition as described above. For diseases in which the expression of the natural gene or the activity of the polypeptide is lower in a diseased patient when compared to the level of expression or activity in a healthy patient, the polypeptide, nucleic acid molecule, ligand, compound or composition administered to the patient should be an agonist. For diseases in which the expression of the natural gene or activity of the polypeptide is higher in a diseased patient when compared to the level of expression or activity in a healthy patient, the polypeptide, nucleic acid molecule, vector, ligand, compound or composition administered to the patient is an antagonist. By the term “agonist” is meant herein, any polypeptide, peptide, synthetic molecule or organic molecule that functions as an activator, by increasing the effective biological activity of a polypeptide, for example, by increasing gene expression or enzymatic activity. By the term “antagonist” is meant herein, any polypeptide, peptide, synthetic molecule or organic molecule that functions as an inhibitor, by decreasing the effective biological activity of the gene product, for example, by inhibiting gene expression of an enzyme or a pharmacological receptor.

[0214] The invention also provides for the use of a polypeptide, nucleic acid molecule, vector, ligand or pharmaceutical composition according to any one of the above-described aspects of the invention in modifying the response of a cell to conditions of hypoxia.

[0215] The invention also provides a polypeptide, nucleic acid molecule, vector, ligand or pharmaceutical composition according to any one of the above-described aspects of the invention, for use in the manufacture of a medicament for the treatment of a hypoxia-regulated condition.

[0216] The invention also provides a method of monitoring the therapeutic treatment of disease or physiological condition in a patient, comprising monitoring over a period of time the level of expression or activity of polypeptide, nucleic acid molecule, vector or ligand in tissue from said patient, wherein altering said level of expression or activity over the period of time towards a control level is indicative of regression of said disease or physiological condition.

[0217] The invention also provides a method of providing a hypoxia regulating gene, an apoptotic or an angiogenesis regulating gene by administering directly to a patient in need of such therapy an expressible vector comprising expression control sequences operably linked to one or more of the nucleic acid molecules as described above.

[0218] The invention also provides a method of diagnosing a hypoxia-regulated condition in a patient, comprising assessing the level of expression of a natural gene encoding a polypeptide according to any one of the aspects of the invention described above in tissue from said patient and comparing said level of expression or activity to a control level, wherein a level that is different to said control level is indicative of the hypoxia-related condition.

[0219] Such a method of diagnosis may be carried out in vitro. One example of a suitable method comprises the steps of: (a) contacting a ligand as described above with a biological sample under conditions suitable for the formation of a ligand-polypeptide complex; and (b) detecting said complex.

[0220] A further example of a suitable method may comprises the steps of: a) contacting a sample of tissue from the patient with a nucleic acid probe under stringent conditions that allow the formation of a hybrid complex between a nucleic acid molecule whose sequence is recited in any one of SEQ ID NOS: 2, 4, 6, 8, 10, 12, 14, 16, 18, 20, 22, 24, 26, 28, 30, 32, 34, 36, 38, 40, 42, 44, 46, 48, 50, 52, 54, 56, 58, 60, 62, 64, 66, 68, 70, 72, 74, 76, 78, 80, 82, 84, 86, 86a, 88, 90, 90a, 92, 92a, 94, 96, 98, 100, 102, 104, 106, 108, 110, 112, 114, 116, 118, 120, 122, 124, 126, 128, 130, 132, 134, 136, 138, 140, 142, 144, 146, 148, 150, 152, 154, 156, 158, 160, 162, 164, 166, 168, 170, 172, 174, 176, 178, 180, 182, 184, 186, 188, 190, 192, 194, 196, 198, 200, 202, 204, 206, 208, 210, 212, 214, 216, 218, 220, 222, 224, 226, 228, 230, 232, 234, 236, 238, 240, 242, 244, 246, 248, 250, 252, 254, 256, 258, 260, 262, 264, 266, 268, 270, 272, 274, 276, 278, 280, 282, 284, 286, 288, 290, 292, 294, 296, 298, 300, 302, 304, 306, 308, 310, 312, 314, 316, 318, 320, 322, 324, 326, 328, 330, 332, 334, 336, 338, 340, 342, 344, 346, 348, 350, 352, 354, 356, 358, 360, 362, 364, 366, 368, 370, 372, 374, 376, 378, 380, 382, 384, 386, 388, 390, 392, 394, 396, 398, 400, 402, 404, 406, 408, 410, 412, 414, 416, 418, 420, 422, 424, 426, 428, 430, 432, 434, 436, 438, 440, 442, 444, 446, 448, 450, 452, 454, 456, 458, 460, 462, 464, 466, 468, 470, 472, 474, 476, 478, 480, 482, 484, 486 and 488, and the probe; b) contacting a control sample with said probe under the same conditions used in step a); and c) detecting the presence of hybrid complexes in said samples; wherein detection of levels of the hybrid complex in the patient sample that differ from levels of the hybrid complex in the control sample is indicative of the hypoxia-related condition.

[0221] A still further example of a suitable method may comprise the steps of: a) contacting a sample of nucleic acid from tissue of the patient with a nucleic acid primer under stringent conditions that allow the formation of a hybrid complex between a nucleic acid molecule whose sequence is recited in any one of SEQ ID NOS: 2, 4, 6, 8, 10, 12, 14, 16, 18, 20, 22, 24, 26, 28, 30, 32, 34, 36, 38, 40, 42, 44, 46, 48, 50, 52, 54, 56, 58, 60, 62, 64, 66, 68, 70, 72, 74, 76, 78, 80, 82, 84, 86, 86a, 88, 90, 90a, 92, 92a, 94, 96, 98, 100, 102, 104, 106, 108, 110, 112, 114, 116, 118, 120, 122, 124, 126, 128, 130, 132, 134, 136, 138, 140, 142, 144, 146, 148, 150, 152, 154, 156, 158, 160, 162, 164, 166, 168, 170, 172, 174, 176, 178, 180, 182, 184, 186, 188, 190, 192, 194, 196, 198, 200, 202, 204, 206, 208, 210, 212, 214, 216, 218, 220, 222, 224, 226, 228, 230, 232, 234, 236, 238, 240, 242, 244, 246, 248, 250, 252, 254, 256, 258, 260, 262, 264, 266, 268, 270, 272, 274, 276, 278, 280, 282, 284, 286, 288, 290, 292, 294, 296, 298, 300, 302, 304, 306, 308, 310, 312, 314, 316, 318, 320, 322, 324, 326, 328, 330, 332, 334, 336, 338, 340, 342, 344, 346, 348, 350, 352, 354, 356, 358, 360, 362, 364, 366, 368, 370, 372, 374, 376, 378, 380, 382, 384, 386, 388, 390, 392, 394, 396, 398, 400, 402, 404, 406, 408, 410, 412, 414, 416, 418, 420, 422, 424, 426, 428, 430, 432, 434, 436, 438, 440, 442, 444, 446, 448, 450, 452, 454, 456, 458, 460, 462, 464, 466, 468, 470, 472, 474, 476, 478, 480, 482, 484, 486 and 488, and the primer; b) contacting a control sample with said primer under the same conditions used in step a); c) amplifying the sampled nucleic acid; and d) detecting the level of amplified nucleic acid from both patient and control samples; wherein detection of levels of the amplified nucleic acid in the patient sample that differ significantly from levels of the amplified nucleic acid in the control sample is indicative of the hypoxia-related condition.

[0222] A still further example of a suitable method may comprise the steps of: a) obtaining a tissue sample from a patient being tested for the hypoxia-related condition; b) isolating a nucleic acid molecule according to any one of the above-described aspects of the invention from said tissue sample; and c) diagnosing the patient for the hypoxia-related condition by detecting the presence of a mutation which is associated with the hypoxia-related condition in the nucleic acid molecule as an indication of the hypoxia-related condition. This method may comprise the additional step of amplifying the nucleic acid molecule to form an amplified product and detecting the presence or absence of a mutation in the amplified product.

[0223] Particular hypoxia-related conditions that may be diagnosed in this fashion include cancer, ischaemia, reperfusion, retinopathy, neonatal stress, preeclapmsia, atherosclerosis, rheumatoid arthritis, undesired hair loss, cardiac arrest or stroke, for example, caused by a disorder of the cerebral, coronary or peripheral circulation.

[0224] In a further aspect, the invention provides a method for the identification of a compound that is effective in the treatment and/or diagnosis of a hypoxia-regulated condition, comprising contacting a polypeptide, nucleic acid molecule, or ligand according to any one of the above-described aspects of the invention with one or more compounds suspected of possessing binding affinity for said polypeptide, nucleic acid molecule or ligand, and selecting a compound that binds specifically to said nucleic acid molecule, polypeptide or ligand.

[0225] For example, the discovery of the involvement of the EGLN3 (BAB15101; SEQ ID NO: 85), the EGLN3 splice variant (SEQ ID NO: 85a), EGLN1 (c1orf12; AAG34568; SEQ ID NO: 89), CAB81622, SM20 and other equivalent proteins, in the hypoxia response allows for the design of screening methods capable of identifying compounds that are effective in the control of the activity of these proteins and which are therefore effective in treating disorders associated with aberrant protein function under conditions of hypoxia.

[0226] Such screening methods are preferably designed so as to screen for ligands which bind specifically to, and which preferably inhibit the hypoxia-induced activity of, a EGLN3 (BAB15101; SEQ ID NO: 85), the EGLN3 splice variant (SEQ ID NO: 85a), EGLN1 (c1orf12; AAG34568; SEQ ID NO: 89), CAB81622, or SM20 polypeptide. Such a ligand may, for example, be an antibody that is immunospecific for the polypeptide in question. In an alternative, such a ligand may be a compound that modulates the interaction between the polypeptide or functional equivalent, and its cellular substrate(s). In the case of a EGLN3 (BAB15101; SEQ ID NO: 85), the EGLN3 splice variant (SEQ ID NO: 85a), EGLN1 (c1orf12; AAG34568; SEQ ID NO: 89), CAB81622, or SM20 polypeptide, cellular substrates include Hif1alpha, Hif2alpha, Hif3alpha and other members of the PAS-domain transcription factor family-modulation of the interaction between a EGLN3 (BAB15101; SEQ ID NO: 85), EGLN3 splice variant (SEQ ID NO: 85a), EGLN1 (c1orf12; AAG34568; SEQ ID NO: 89), CAB81622, or SM20 polypeptide and such proteins thus provides a useful mechanism by which to control the cellular response to hypoxia. For the hypoxia-regulated polypeptides implicated herein which are active as prolyl 4-hydroxylases, examples of suitable compounds include substrate-based inhibitors, such as 3-exomethyleneproline peptide like compounds (Tandon M et al (1998) Substrate specificity of human prolyl-4-hydroxylase, Bioorg. Med. Chem. Lett. 8:1139-44), derivatives of proline, derivatives of 4(S)hydroxy proline, and derivatives of 4-keto proline. Further, in view of the fact that the activity of proline-4-hydroxylase is iron, 2-oxoglutarate and asorbic acid dependent (Kivirikko K I, Pihlajaniemi T. (1998) Collagen hydroxylases and the protein disulfide isomerase subunit of prolyl 4-hydroxylases. Adv Enzymol Relat Areas Mol Biol. 72:325-98) and the activity of HIF targeting prolyl hydroxylases such as those recited above is also dependent on these co-factors (Bruick R K, McKnight S L. (2001) A conserved family of prolyl-4-hydroxylases that modify HIF. Science. 294(5545):1337-40), examples of suitable compounds include cofactor-based inhibitors such as 2-oxoglutarate analogues, ascorbic acid analogues and iron chelators.

[0227] Methods for measuring prolyl 4-hydroxylase activity, such as mediated by EGLN3 (BAB15101; SEQ ID NO: 85), EGLN3 splice variant (SEQ ID NO: 85a), EGLN1 (c1orf12; AAG34568; SEQ ID NO: 89), CAB81622, or the SM20 polypeptide on a HIF-1α substrate are known to those of skill in the art. For example, enzyme assays using pure or partially pure preparations of enzyme may utilize colourimetric determination of the rate of accumulation of hydroxyproline in the substrate (such as HIF-1α) in the presence and absence of candidate compounds (see Berg, R. A. Methods Enzymol 1982;82 Pt A:372-98. Determination of 3- and 4-hydroxyproline). Enzyme assays for impure preparations of protein, such as cell lysates and membrane preparations should be more specific. For example, antibodies may be developed that are specific for the proline-hydroxylated form of HIF-1α and these can then be utilized in an ELISA technique. Alternatively, if necessary such antibodies could be used on Western blots at a reasonable throughput. Other assays might use mass spectrometry to measure the proportion of proline hydroxylated HIF-1α Most simply, this would involve prior trypsin digestion of the lysate, followed by mass spectrometric analysis of the digest. The peaks would be predicted and identified that correspond to un-hydroxylated and hydroxylated forms of the relevant HIF-1α apolypeptide or peptide.

[0228] Cell-based assays may also be used to follow prolyl 4-hydroxylase activity mediated by a polypeptide according to the invention. Such assay could be based on the use of a reporter gene such as firefly luciferase driven by the hypoxia response element (HRE). Functional HIF is required for induction via the HRE, and thus inhibition of HIF prolyl hydroxylase will lead to increased light output. Light is measured in a luminometer, such as is available from Amersham Biosciences and other providers, which typically reads 24, 96 or 384-well plates. One advantage of using cell-based assays is that the enzyme effector is identified under physiological conditions.

[0229] In another example, the invention provides a ligand which binds specifically to, and which preferably inhibits the hypoxia-induced activity of, a PI3-kinase polypeptide according to any one of the above-described aspects of the invention. Such a ligand may, for example, be an antibody that is immunospecific for the polypeptide in question. In an alternative, such a ligand may be a compound that modulates the interaction between the Hu.BCAP-A, Hu.BCAP-B or Hu.BCAP-C polypeptide or a functional equivalent thereof, a tyrosine kinase protein (such as srk) and/or a PI3-kinase protein and thereby modulates PI3-kinase activity. Preferably, the interaction between the Hu.BCAP-A polypeptide or a functional equivalent thereof, a tyrosine kinase protein (such as srk) and/or a PI3-kinase protein is inhibited, such that PI3-kinase activity is also inhibited.

[0230] Importantly, the identification of the sequence and function Hu.BCAP-A and its functional equivalents allows for the design of screening methods capable of identifying compounds that are effective in the control of PI3-kinase adaptor molecule activity and PI3-kinase activity and which are therefore effective in treating disorders associated with aberrant PI3-kinase function such as cancer and other proliferative diseases, and inflammatory and immunological conditions. Such screening methods are preferably designed so as to screen for ligands which binds specifically to, and which preferably inhibits the hypoxia-induced activity of, a PI3-kinase polypeptide according to any one of the above-described aspects of the invention. Such a ligand may, for example, be an antibody that is immunospecific for the PI3-kinase polypeptide in question. In an alternative, such a ligand may be a compound that modulates the interaction between the Hu.BCAP-A polypeptide or a functional equivalent thereof, a tyrosine kinase protein (such as srk) and/or a PI3-kinase protein and thereby modulates PI3-kinase activity. Preferably, the interaction between the Hu.BCAP-A polypeptide or a functional equivalent thereof, a tyrosine kinase protein (such as srk) and/or a PI3-kinase protein is inhibited, such that PI3-kinase activity is also inhibited.

[0231] Assays for PI3-kinase activity are known in the art. For example, different phosphorylated forms of proteins that are substrate for PI3-kinase can be assayed using antibodies that are specific for those forms. For example, the kinase PKB/AKT is activated by two phosphorylation events, both of which are induced by the phosphoinositide dependent kinase PDK1 following PI3-kinase activation. Antibodies that are specific for the various phosphorylated forms of PKB/AKT are available in the art, such as from New England Biolabs (UK) Ltd of Hitchin, Hertfordshire, who supply the following antibodies: catalogue number 9272 can be used to measure total levels of phosphorylated and un-phosphorylated PKB/AKT. Antibody catalogue number 9271 can be used to measure levels of PKB/AKT phosphorylated at Ser473. Antibody catalogue number 9275 can be used to measure levels of PKB/AKT phosphorylated at Thr308. Other suitable antibodies will be known to those of skill in the art. Immunoassays to measure these proteins can be carried out in many different and convenient ways, as is well known to those skilled in the art. For example, for the purpose of screening modulators of BCAP function, enzyme-linked immunoassays can be carried out at high throughput, such as in 96 or 384-well plates, or at higher or lower well density if required by the number of assays to be performed. These assays could be based on the use of NEB 9272 as an unlabelled antibody immobilized in the wells to capture all forms of PKB/AKT, and then fluorescently-labelled or enzyme-linked NEB9271 or NEB9275 could be used to measure Ser473 or Thr308-phosphorylated PKB/AKT, respectively. Alternatively, appropriate labelled antibody could be used to visualize unphosphorylated or phosphorylated forms of PKB/AKT in adherent cells in flat-bottomed wells or discrete regions of a slide that may have received micro-dispensed treatments scanned with a fluorescence microscope.

[0232] It is also known that PI3-kinase complex phosphorylates distinct lipids both in vitro and in vivo. In vitro, the PI3-kinase complex can phosphorylate phosphatidylinositol (PI), phosphatidylinositol 4-phosphate (PI4P) and phophatidylinositol 4,5-bisphosphate (PI(4,5)P₂) on the D3 hydroxyl group of the inositol ring, producing phosphatidylinositol 3-phosphate (PI3P), phosphatidylinositol 3,4-bisphosphate (PI(3,4)P₂) and phosphatidylinositol 3,4,5-trisphosphate (PI(3,4,5)P₃) (see Kapellar et al., Bioessays 16:565-576 (1994); and Stephens et al., Biochim. Biophys. Acta 1179:27-75 (1993). Activation of the PI3-kinase complex in cells results in elevated levels of PI(3,4)P₂ and PI(3,4,5)P₃, but not PI3P (see Auger et al., Cell 57:167-175 (1989); Stephens et al., Nature 351:33-39 (1991); Traynor-Kaplan et al., Nature 334:353-356 (1988); and Traynor-Kaplan J. Biol. Chem. 264:15668-15673 (1989)). For determination of the amount of PI3P or PI(3,4)P₂ formed, one may employ any number of a variety of well known assay methods. For example, HPLC analysis can be readily used to quantitatively identify the above described reaction products, using, e.g., tritiated substrates, and the like. Similarly, on a more qualitative level, thin layer chromatography (TLC) can also be used to identify reaction products. The levels of the above described reaction products produced in the presence and absence of the test compound are then compared. Where the presence of the test compound results in an increase or decrease in the level of the reaction product produced by the polypeptide, it is indicative that the test compound is an agonist or antagonist of PI3-kinase activity, respectively, and more particularly, the activity of the Hu.BCAP-A polypeptide and/or its functional equivalents, as described herein.

[0233] For example, assay methods specific to PI3-kinase polypeptides may comprise incubating a mixture of PI or PI4P and a polypeptide selected from the group consisting of Hu.BCAP-A or a functional equivalent thereof, PI3-kinase, a tyrosine kinase protein or biologically active fragments thereof, in the presence and absence of the test compound. The mixture is then assayed to determine the amount of PI3P or PI(3,4)P₂ produced in the presence and absence of the test compound. The amount of PI3P or PI(3,4)P₂ produced in the presence of the test compound is compared to the amount of PI3P or PI(3,4)P₂ produced in the absence of the test compound. An increase or decrease in the amount of PI3P or PI(3,4)P₂ in the presence of the test compound is indicative that the test compound is an agonist or antagonist of Hu.BCAP-A-mediated PI3-kinase activity, respectively.

[0234] According to a still further aspect of the invention, there is provided a kit useful for diagnosing a hypoxia-regulated condition, comprising a first container containing a nucleic acid probe that hybridizes under stringent conditions with a nucleic acid molecule according to any one of the aspects of the invention described above; a second container containing primers useful for amplifying said nucleic acid molecule; and instructions for using the probe and primers for facilitating the diagnosis of the hypoxia-regulated condition. The kit may additionally comprise a third container holding an agent for digesting unhybridised RNA.

[0235] To facilitate in the diagnosis of the hypoxia-regulated condition using one of the methods outlined above, in a further aspect, the invention provides an array of at least two nucleic acid molecules, wherein each of said nucleic acid molecules either corresponds to the sequence of, is complementary to the sequence of, or hybridizes specifically to a nucleic acid molecule according to any one of the aspects of the invention described above. Such an array may contain nucleic acid molecules that either correspond to the sequence of, are complementary to the sequence of, or hybridise specifically to at least 2, 3, 4, 5, 6, 7, 8, 9, 10, 11, 12, 13, 14, 15, 16, 17, 18, 19, 20, 21, 22, 23, 24, 25, 26, 27, 28, 29, 30, 31, 32, 33, 34, 35, 36, 37, 38, 39, 40, 41, 42, 43, 44, 45, 46, 47, 48, 49, 50, 51, 52, 53, 54, 55, 56, 57, 58, 59, 60, 61, 62, 63, 64, 65, 66, 67, 68, 69, 70, 71, 72, 73, 74, 75, 76, 77, 78, 79, 80, 81, 82, 83, 84, 85, 86, 87, 88, 89, 90, 90a, 91, 92, 92a, 93, 94, 95, 96, 97, 98, 99, 100, 101, 102, 103, 104, 105, 106, 107, 108, 109, 110, 111, 112, 113, 114, 115, 116, 117, 118, 119, 120, 121, 122, 123, 124, 125, 126, 127, 128, 129, 130, 131, 132, 133, 134, 135, 136, 137, 138, 139, 140, 141, 142, 143, 144, 145, 146, 147, 148, 149, 150, 151, 152, 153, 154, 155, 156, 157, 158, 159, 160, 161, 162, 163, 164, 165, 166, 167, 168, 169, 170, 171, 172, 173, 174, 175, 176, 177, 178, 179, 180, 181, 182, 183, 184, 185, 186, 187, 188, 189, 190, 191, 192, 193, 194, 195, 196, 197, 198, 199, 200, 201, 202, 203, 204, 205, 206, 207, 208, 209, 210, 211, 212, 213, 214, 215, 216, 215, 217, 218, 219, 220, 221, 222, 223, 224, 225, 226, 227, 228, 229, 230, 231, 232, 233, 234, 235, 236, 237, 238, 239, 240, 241, 242, 243, 244, 245, 246, 247, 248, 249, 250, 251, 252, 253, 254, 255, 256, 257, 258, 259, 260, 261, 262, 263, 264, 265, 266, 267, 268, 269, 270, 271, 272, 273, 274, 275, 276, 277, 278, 279, 280, 281, 282, 283, 284, 285, 286, 287, 288, 289, 290, 291, 292, 293, 294, 295 or more of the nucleic acid molecules implicated in a hypoxia-regulated condition as recited above. The nucleic acid molecules on the array may consist of oligonucleotides of between twelve and fifty nucleotides, more preferably, between forty and fifty nucleotides. Alternatively, the nucleic acid molecules on the array may consist of PCR-amplified cDNA inserts where the nucleic acid molecule is between 300-2000 nucleotides.

[0236] In a related aspect, again useful for diagnosis, the invention provides an array of antibodies, comprising at least two different antibody species, wherein each antibody species is immunospecific with a polypeptide implicated in a hypoxia-regulated condition as described above. The invention also provides an array of polypeptides, comprising at least two polypeptide species as recited above, wherein each polypeptide species is implicated in a hypoxia-regulated condition, or is a functional equivalent variant or fragment thereof.

[0237] Kits useful in the diagnostic methods of the invention may comprise such nucleic acid, antibody and/or polypeptide arrays.

[0238] According to the invention, a kit may also comprise one or more antibodies that bind to a polypeptide as recited above, and a reagent useful for the detection of a binding reaction between said antibody and said polypeptide.

[0239] According to a still further aspect of the invention, there is provided a genetically-modified non-human animal that has been transformed to express higher, lower or absent levels of a polypeptide according to any one of the aspects of the invention described above. Preferably, said genetically-modified animal is a transgenic or knockout animal.

[0240] The invention also provides a method for screening for a compound effective to treat a hypoxia-regulated condition, by contacting a non-human genetically-modified animal as described above with a candidate compound and determining the effect of the compound on the physiological state of the animal.

[0241] General Techniques

[0242] The practice of the present invention will employ, unless otherwise indicated, conventional techniques of molecular biology, microbiology, recombinant DNA technology and immunology, which are within the skill of those working in the art.

[0243] Most general molecular biology, microbiology recombinant DNA technology and immunological techniques can be found in Sambrook et al., Molecular Cloning, A Laboratory Manual (1989) Cold Harbor-Laboratory Press, Cold Spring Harbor, N.Y. or Ausubel et al., Current protocols in molecular biology (1990) John Wiley and Sons, N.Y.

[0244] Unless defined otherwise, all technical and scientific terms used herein have the same meaning as commonly understood by one of ordinary skill in the art to which this invention belongs.

[0245] A. Polypeptides

[0246] The term “polypeptide” as used herein, refers to a chain (may be branched or unbranched) of two or more amino acids linked to each other by means of a peptide bond or modified peptide bond (isosteres). The term polypeptide encompasses but is not limited to oligopeptides, peptides and proteins. The polypeptide of the invention may additionally be either in a mature protein form or in a pre-, pro- or prepro-protein form that requires subsequent cleavage for formation of the active mature protein. The pre-, pro-, prepro-part of the protein is often a leader or secretory sequence but may also be an additional sequence added to aid protein purification (for example, a His tag) or to conform a higher stability to the protein.

[0247] A polypeptide according to the invention may also include modified amino acids, that is, amino acids other than those 20 that are gene-encoded. This modification may be a result of natural processes such as post-translational processing or by chemical modification. Examples of modifications include acetylation, acylation, amidation, ADP-ribosylation, arginylation, attachment of a lipid derivative or phosphatidylinositol, γ-carboxylation, covalent attachment of a flavin or haeme moiety, a nucleotide or nucleotide derivative, cyclisation, demethylation, disulphide bond formation, formation of covalent cross-links, formylation, glycosylation, GPI anchor formation, hydroxylation, iodination, lipid attachment, methylation, myristoylation, oxidation, proteolytic processing, phosphorylation, prenylation, racemisation, selenoylation, sulphation, and ubiquitination. Modification of the polypeptide can occur anywhere within the molecule including the backbone, the amino acid side-chains or at the N- or C-terminals.

[0248] A polypeptide according to the invention may either be isolated from natural sources (for example, purified from cell culture), or be a recombinantly produced polypeptide, or a synthetically produced polypeptide or a combination of all the above.

[0249] Antibodies

[0250] A polypeptide according to the invention, its functional equivalents and/or any immunogenic fragments derived from the polypeptide may be used to generate ligands including immunospecific monoclonal or polyclonal antibodies, or antibody fragments. These antibodies can then be used to isolate or identify clones expressing the polypeptide of the invention or to purify the polypeptide by affinity chromatography. Further uses of these immunospecific antibodies may include, but are not limited to, diagnostic, therapeutic or general assay applications. Examples of assay techniques that employ antibodies are immunoassays, radioimmunoassays (RIA) or enzyme linked immunosorbent assay (ELISA). In these cases, the antibodies may be labelled with an analytically-detectable reagent including radioisotopes, a fluorescent molecule or any reporter molecule.

[0251] The term “immunospecific” as used herein refers to antibodies that have a substantially higher affinity for a polypeptide of this invention compared with other polypeptides. The term “antibody” as used herein refers to a molecule that is produced by animals in response to an antigen and has the particular property of interacting specifically with the antigenic determinant that induced its formation. Fragments of the aforementioned molecule such as Fab, F(ab′)₂ and scFv, which are capable of binding the antigen determinant, are also included in the term “antibody”. Antibodies may also be modified to make chimeric antibodies, where non-human variable regions are joined or fused to human constant regions (for example, Liu et al., PNAS, USA, 84, 3439 (1987)). Particularly, antibodies may be modified to make them less immunogenic to an individual in a process such as humanisation (see, for example, Jones et al., Nature, 321, 522 (1986); Verhoeyen et al., Science, 239, 1534 (1988); Kabat et al., J. Immunol., 147, 1709 (1991); Queen et al., PNAS, USA, 86, 10029 (1989); Gorman et al., PNAS, USA, 88, 34181 (1991) and Hodgson et al., Bio/Technology, 9, 421 (1991)). The term “humanised antibody”, as used herein, refers to antibody molecules in which the amino acids of the CDR (complementarity-determining region) and selected other regions in the variable domains of the heavy and/or light chains of a non-human donor antibody have been substituted with the equivalent amino acids of a human antibody. The humanised antibody therefore closely resembles a human antibody, but has the binding ability of the donor antibody. Antibodies may also have a “bispecific” nature, that is, the antibody has two different antigen binding domains, each domain being directed against a different epitope.

[0252] Specific polyclonal antibodies may be made by immuno-challenging an animal with a polypeptide of this invention. Common animals used for the production of antibodies include the mouse, rat, chicken, rabbit, goat and horse. The polypeptide used to immuno-challenge the animal may be derived by recombinant DNA technology or may be chemically-synthesised. In addition, the polypeptide may be conjugated to a carrier protein. Commonly used carriers to which the polypeptides may be conjugated include, but are not limited to BSA (bovine serum albumin), thyroglobulin and keyhole limpet haemocyanin. Serum from the immuno-challenged animal is collected and treated according to known procedures, for example, by immunoaffinity chromatography.

[0253] Specific monoclonal antibodies can generally be made by methods known to one skilled in the art (see for example, Kohler, G. and Milstein, C., Nature 256, 495-497 (1975); Kozbor et al., Immunology Today 4: 72 (1983); Cole et al., 77-96 in Monoclonal Antibodies and Cancer Therapy, Alan R. Liss, Inc. (1985) and Roitt, I. et al., Immunology, 25.10, Mosby-Year Book Europe Limited (1993)). Panels of monoclonal antibodies produced against the polypeptides of the invention can be screened for various properties, i.e., for isotype, epitope, affinity, etc. against which they are directed. Alternatively, genes encoding the monoclonal antibodies of interest may be isolated from hybridomas, for instance using PCR techniques known in the art, and cloned and expressed in appropriate vectors.

[0254] Phage display technology may be utilized to select the genes encoding the antibodies that have exhibited an immunspecific response to the polypeptides of the invention (see McCafferty, J., et al., (1990), Nature 348, 552-554; Marks, J. et al., (1992) Biotechnology 10, 779-783).

[0255] Intrabodies are antibody molecules which are expressed within cells in order to modulate the function of specific proteins (Chen et al (1994), Human Gene Therapy vol 5 pp595-601). Intrabodies are included as examples of antibodies within the terms of the present invention. Optimally intrabodies may be in the form of single chain Fv antibodies, or in the form of Fab antibodies. They may be expressed from a wide variety of recombinant vectors, including plasmid or viral-based vectors. The viral vectors may be based on adenovirus, adeno-associated virus, retroviruses or lentiviruses or other systems which are appropriate for non-lytic expression. Intrabodies may be selected directly in yeast using the yeast 2-hybrid system with the target protein as a bait (Auf der Maur et al (2001) FEBS Lett vol 508 pp407-12). This has the advantage that the intrabodies are selected under the reducing conditions which prevail in eukaryotic cells. Alternatively, they may be selected in vitro by phage display or ribosome display or other selection methods based on binding between the intrabody and the target protein or a target region of the protein.

[0256] Ligands

[0257] The polypeptides of the invention may also be used to search for interacting ligands. Methods for doing this include the screening of a library of compounds (see Coligan et al., Current Protocols in Immunology 1(2); Chapter 5 (1991), isolating the ligands from cells, isolating the ligands from a cell-free preparation or natural product mixtures. Ligands to the polypeptide may activate (agonise) or inhibit (antagonize) its activity. Alternatively, compounds may affect the levels of the polypeptide present in the cell, including affecting gene expression, mRNA stability and the degree of post-translational modification of the encoded protein. The invention thus embraces methods for the identification of a compound that is effective in the treatment and/or diagnosis of disease, comprising contacting a polypeptide, a nucleic acid molecule or host cell according to any one of the embodiments of the invention described herein with one or more compounds suspected of possessing binding affinity for said polypeptide or nucleic acid molecule, and selecting a compound that binds specifically to said nucleic acid molecule or polypeptide, or that affects the level of gene expression, mRNA stability or the degree of post-translational modification of the encoded protein.

[0258] Ligands to the polypeptide form a further aspect of the invention, as discussed in more detail above. Preferred “antagonist” ligands include those that bind to the polypeptide of this invention and strongly inhibit any activity of the polypeptide. Preferred “agonist” ligands include those that bind to the polypeptide and strongly induce activity of the polypeptide of this invention or increases substantially the level of the polypeptide in the cell. As defined above, the term “agonist” is meant to include any polypeptide, peptide, synthetic molecule or organic molecule that functions as an activator, by increasing the effective biological activity of a polypeptide, for example, by increasing gene expression or enzymatic activity. The term “antagonist” is meant to include any polypeptide, peptide, synthetic molecule or organic molecule that functions as an inhibitor, by decreasing the effective biological activity of the gene product, for example, by inhibiting gene expression of an enzyme or a pharmacological receptor.

[0259] Ligands to a polypeptide according to the invention may come in various forms, including natural or modified substrates, enzymes, receptors, small organic molecules such as small natural or synthetic organic molecules of up to 2000 Da, preferably 800 Da or less, peptidomimetics, inorganic molecules, peptides, polypeptides, antibodies, structural or functional mimetics of the aforementioned.

[0260] For the hypoxia-regulated polypeptides implicated herein which are active as prolyl 4-hydroxylases, examples of suitable compounds include substrate-based inhibitors, such as 3-exomethyleneproline peptide like compounds (Tandon M et al (1998) Substrate specificity of human prolyl-4-hydroxylase, Bioorg. Med. Chem. Lett. 8:1139-44), derivatives of proline, derivatives of 4(S)hydroxy proline, and derivatives of 4-keto proline. Further, in view of the fact that the activity of proline-4-hydroxylase is iron, 2-oxoglutarate and asorbic acid dependent (Kivirikko KI, Pihlajaniemi T. (1998) Collagen hydroxylases and the protein disulfide isomerase subunit of prolyl 4-hydroxylases. Adv Enzymol Relat Areas Mol Biol. 72:325-98) and the activity of HIF targeting prolyl hydroxylases such as those recited above is also dependent on these co-factors (Bruick R K, McKnight S L. (2001) A conserved family of prolyl-4-hydroxylases that modify HIF. Science. 294(5545): 1337-40), examples of suitable compounds include cofactor-based inhibitors such as 2-oxoglutarate analogues, ascorbic acid analogues and iron chelators.

[0261] B. Nucleic Acid Molecules

[0262] Preferred nucleic acid molecules of the invention are those which encode the polypeptide sequences recited in any one of SEQ ID NOS 1, 3, 5, 7, 9, 11, 13, 15, 17, 19, 21, 23, 25, 27, 29, 31, 33, 35, 37, 39, 41, 43, 45, 47, 49, 51, 53, 55, 57, 59, 63, 67, 69, 73, 75, 77, 85, 85a, 87, 89, 91, 93, 95, 99, 103, 113, 115, 119, 121, 129, 131, 133, 137, 139, 141, 145, 151, 153, 157, 159, 163, 169, 181, 187, 201, 205, 207, 209, 527, 529 and 531. Examples of such nucleic acid molecules include those listed in SEQ ID NOS 2, 4, 6, 8, 10, 12, 14, 16, 18, 20, 22, 24, 26, 28, 30, 32, 34, 36, 38, 40, 42, 44, 46, 48, 50, 52, 54, 56, 58, 60, 62, 64, 66, 68, 70, 72, 74, 76, 78, 80, 82, 84, 86, 86a, 88, 90, 90a, 92, 92a, 94, 96, 98, 100, 102, 104, 106, 108, 110, 112, 114, 116, 118, 120, 122, 124, 126, 128, 130, 132, 134, 136, 138, 140, 142, 144, 146, 148, 150, 152, 154, 156, 158, 160, 162, 164, 166, 168, 170, 172, 174, 176, 178, 180, 182, 184, 186, 188, 190, 192, 194, 196, 198, 200, 202, 204, 206, 208, 210, 212, 214, 216, 528, 530 and 532, homologous nucleic acids and nucleic acids that are complementary to these nucleic acid molecules. Nucleic acid molecules of this aspect of the invention may be used in numerous methods and applications, as described generally herein. A nucleic acid molecule preferably comprises of at least n consecutive nucleotides from any one of the sequences disclosed in SEQ ID NOS 2, 4, 6, 8, 10, 12, 14, 16, 18, 20, 22, 24, 26, 28, 30, 32, 34, 36, 38, 40, 42, 44, 46, 48, 50, 52, 54, 56, 58, 60, 62, 64, 66, 68, 70, 72, 74, 76, 78, 80, 82, 84, 86, 86a, 88, 90, 90a, 92, 92a, 94, 96, 98, 100, 102, 104, 106, 108, 110, 112, 114, 116, 118, 120, 122, 124, 126, 128, 130, 132, 134, 136, 138, 140, 142, 144, 146, 148, 150, 152, 154, 156, 158, 160, 162, 164, 166, 168, 170, 172, 174, 176, 178, 180, 182, 184, 186, 188, 190, 192, 194, 196, 198, 200, 202, 204, 206, 208, 210, 212, 214, 216, 528, 530 and 532, where n is 10 or more. A nucleic acid molecule of the invention also includes sequences that are complementary to the nucleic acid molecule described above (for example, for antisense or probing purposes).

[0263] A nucleic acid molecule according to this aspect of the invention may be in the form of RNA, such as mRNA, DNA, such as cDNA, synthetic DNA or genomic DNA. The nucleic acid molecule may be double-stranded or single-stranded. The single-stranded form may be the coding (sense) strand or the non-coding (antisense) strand. A nucleic acid molecule may also comprise an analogue of DNA or RNA, including, but not limited to modifications made to the backbone of the molecule, such as, for example, a peptide nucleic acid (PNA). The term “PNA” as used herein, refers to an antisense molecule that comprises an oligonucleotide of at least five nucleotides in length linked to a peptide backbone of amino acid residues, preferably ending in lysine. The terminal lysine confers solubility to the composition. PNAs may be pegylated to extend their lifespan in a cell, where they preferentially bind complementary single-stranded DNA and RNA and stop transcript elongation (Nielsen, P. E. et al. (1993) Anticancer Drug Des. 8:53-63).

[0264] A nucleic acid molecule according to this aspect of the invention can be isolated by cloning, purification or separation of the molecule directly from a particular organism, or from a library, such as a genomic or cDNA library. The molecule may also be synthesised, for example, using chemical synthetic techniques such as solid phase phosphoramidite chemical synthesis. RNA may be synthesized in vitro or in vivo by transcription of the relevant DNA molecule.

[0265] Due to the degeneracy of the genetic code, differing nucleic acid sequences may encode the same polypeptide (or mature polypeptide). Thus, nucleic acid molecules included in this aspect of the invention include any molecule comprising a variant of the sequence explicitly recited. Such variants may include variant nucleic acid molecules that code for the same polypeptide (or mature polypeptide) as that explicitly identified, that code for a fragment of the polypeptide, that code for a functional equivalent of the polypeptide or that code for a fragment of the functional equivalent of the polypeptide. Also included in this aspect of the invention, are variant nucleic acid molecules that are derived from nucleotide substitutions, deletions, rearrangements or insertions or multiple combinations of the aforementioned. Such molecules may be naturally occurring variants, such as allelic variants, non-naturally occurring variants such as those created by chemical mutagenesis, or variants isolated from a species, cell or organism type other than the type from which the sequence explicitly identified originated. Variant nucleic acid molecules may differ from the nucleic acid molecule explicitly recited in a coding region, non-coding region or both these regions.

[0266] Nucleic acid molecules may also include additional nucleic acid sequence to that explicitly recited, for example, at the 5′ or 3′ end of the molecule. Such additional nucleic acids may encode for a polypeptide with added functionality compared with the original polypeptide whose sequence is explicitly identified herein. An example of this would be an addition of a sequence that is heterologous to the original nucleic acid sequence, to encode a fusion protein. Such a fusion protein may be of use in aiding purification procedures or enabling techniques to be carried out where fusion proteins are required (such as in the yeast two hybrid system). Additional sequences may also include leader or secretory sequences such as those coding for pro-, pre- or prepro-polypeptide sequences. These additional sequences may also include non-coding sequences that are transcribed but not translated including ribosome binding sites and termination signals.

[0267] A nucleic acid molecule of the invention may include molecules that are at least 70% identical over their entire length to a nucleic acid molecule as explicitly identified herein in SEQ ID NOS: 2, 4, 6, 8, 10, 12, 14, 16, 18, 20, 22, 24, 26, 28, 30, 32, 34, 36, 38, 40, 42, 44, 46, 48, 50, 52, 54, 56, 58, 60, 62, 64, 66, 68, 70, 72, 74, 76, 78, 80, 82, 84, 86, 86a, 88, 90, 90a, 92, 92a, 94, 96, 98, 100, 102, 104, 106, 108, 110, 112, 114, 116, 118, 120, 122, 124, 126, 128, 130, 132, 134, 136, 138, 140, 142, 144, 146, 148, 150, 152, 154, 156, 158, 160, 162, 164, 166, 168, 170, 172, 174, 176, 178, 180, 182, 184, 186, 188, 190, 192, 194, 196, 198, 200, 202, 204, 206, 208, 210, 212, 214, 216, 528, 530 and 532. Preferably, a nucleic acid molecule according to this aspect of the invention comprises a region that is at least 80% identical over its entire length to a nucleic acid molecule as explicitly identified herein in these SEQ ID NOS, preferably at least 90%, more preferably at least 95% and most preferably at least 98% or 99% identical. Further preferred embodiments include nucleic acid molecules that encode polypeptides that retain substantially the same biological function or activity as the polypeptide explicitly identified herein. The terms “homology” and “identity” should be given the meanings described in detail above with respect to polypeptide analysis. Preferably, nucleotide homology and identity are assessed using the blastn program available at http address www.ncbi.nlm.nih.gov.

[0268] The nucleic acid molecules of the invention can also be engineered using methods generally known in the art. These methods include but are not limited to DNA shuffling; random or non-random fragmentation (by restriction enzymes or shearing methods) and reassembly of fragments; insertions, deletions, substitutions and rearrangements of sequences by site-directed mutagenesis (for example, by PCR). These alterations may be for a number of reasons including for ease of cloning (such as introduction of new restriction sites), altering of glycosylation patterns, changing of codon preferences, splice variants changing the processing, and/or expression of the gene product (the polypeptide) in general or creating fusion proteins (see above).

[0269] Hybridization

[0270] Nucleic acid molecules of the invention may also include antisense molecules that are partially complementary to a nucleic acid molecule as explicitly identified herein in SEQ ID NOS: 2, 4, 6, 8, 10, 12, 14, 16, 18, 20, 22, 24, 26, 28, 30, 32, 34, 36, 38, 40, 42, 44, 46, 48, 50, 52, 54, 56, 58, 60, 62, 64, 66, 68, 70, 72, 74, 76, 78, 80, 82, 84, 86, 86a, 88, 90, 90a, 92, 92a, 94, 96, 98, 100, 102, 104, 106, 108, 110, 112, 114, 116, 118, 120, 122, 124, 126, 128, 130, 132, 134, 136, 138, 140, 142, 144, 146, 148, 150, 152, 154, 156, 158, 160, 162, 164, 166, 168, 170, 172, 174, 176, 178, 180, 182, 184, 186, 188, 190, 192, 194, 196, 198, 200, 202, 204, 206, 208, 210, 212, 214, 216, 528, 530 and 532, and which therefore will hybridise to the encoding nucleic acid molecules. These antisense molecules, including oligonucleotides, can be designed to recognise, specifically bind to and prevent transcription of a target nucleic acid encoding a polypeptide of the invention, as will be known by those of ordinary skill in the art (see Cohen, J. S., Trends in Pharm. Sci., 10, 435 (1989), Okano, J. Neurochem. 56, 560 (1991); O'Connor, J. Neurochem 56, 560 (1991); Lee et al., Nucleic Acids Res 6, 3073 (1979); Cooney et al., Science 241, 456 (1988); Dervan et al., Science 251, 1360 (1991).

[0271] The term “hybridization” used herein refers to any process by which a strand of nucleic acid binds with a complementary strand of nucleic acid by hydrogen bonding, typically forming Watson-Crick base pairs. As carried out in vitro, one of the nucleic acid populations is usually immobilized to a surface, whilst the other population is free. The two molecule types are then placed together under conditions conducive to binding.

[0272] The phrase “stringency of hybridization” refers to the percentage of complementarity that is needed for duplex formation. “Stringency” thus refers to the conditions in a hybridization reaction that favour the association of very similar molecules over association of molecules that differ. Conditions can therefore exist that allow not only nucleic acid strands with 99-100% complementarity to hybridise, but sequences with lower complementarity (for example, 50%) to also hybridise. High stringency hybridization conditions are defined herein as overnight incubation at 42° C. in a solution comprising 50% formamide, 5×SSC (150 mM NaCl, 15 mM trisodium citrate), 50 mM sodium phosphate (pH7.6), 5×Denhardts solution, 10% dextran sulphate, and 20 microgram/ml denatured, sheared salmon sperm DNA, followed by washing the filters in 0.1×SSC at approximately 65° C. Low stringency conditions involve the hybridization reaction being carried out at 35° C. (see Sambrook et al. [supra]). Preferably, the conditions used for hybridization are those of high stringency.

[0273] Some trans- and cis-acting factors that may affect the binding of two complementary strands include strand length, base composition (GC pairs have an extra hydrogen bond and are thus require more energy to separate than AT pairs) and the chemical environment. The presence of monovalent cations (such as Na⁺) stabilizes duplex formation whereas chemical denaturants such as formamide and urea destabilize the duplex by disruption of the hydrogen bonds. Use of compounds such as polyethylene glycol (PEG) can increase reassociation speeds by increasing overall DNA concentration in aqueous solution by abstracting water molecules. Denhardt's reagent or BLOTTO are chemical agents often added to block non-specific attachment of the liquid phase to the solid support. Increasing the temperature will also increase the stringency of hybridization, as will increasing the stringency of the washing conditions following hybridization (Sambrook et al. [supra]).

[0274] Numerous techniques exist for effecting hybridization of nucleic acid molecules. Such techniques usually involve one of the nucleic acid populations being labelled. Labelling methods include, but are not limited to radiolabelling, fluorescence labelling, chemiluminescent or chromogenic labelling or chemically coupling a modified reporter molecule to a nucleotide precursor such as the biotin-streptavidin system. This can be done by oligolabelling, nick-translation, end-labelling or PCR amplification using a labelled polynucleotide. Labelling of RNA molecules can be achieved by cloning the sequences encoding the polypeptide of the invention into a vector specifically for this purpose. Such vectors are known in the art and may be used to synthesise RNA probes in vitro by the addition of an appropriate RNA polymerase such as T7, T3 or SP6 and labelled nucleotides.

[0275] Various kits are commercially available that allow the labelling of molecules. Examples include those made by Pharmacia & Upjohn (Kalamazoo, Mich.); Promega (Madison Wis.); and the U.S. Biochemical Corp. (Cleveland, Ohio). Hybridization assays include, but are not limited to dot-blots, Southern blotting, Northern blotting, chromosome in situ hybridization (for example, FISH [fluorescence in situ hybridization]), tissue in situ hybridization, colony blots, plaque lifts, gridded clone hybridization assays, DNA microarrays and oligonucleotide microarrays. These hybridization methods and others, may be used by a skilled artisan to isolate copies of genomic DNA, cDNA, or RNA encoding homologous or orthologous proteins from other species.

[0276] The invention therefore also embodies a process for detecting a nucleic acid molecule according to the invention, comprising the steps of: (a) contacting a nucleic probe with a biological sample under hybridising conditions to form duplexes: and (b) detecting any such duplexes that are formed. The term “probe” as used herein refers to a nucleic acid molecule in a hybridization reaction whose molecular identity is known and is designed specifically to identify nucleic acids encoding homologous genes in other species. Usually, the probe population is the labelled population, but this is not always the case, as for example, in a reverse hybridization assay.

[0277] One example of a use of a probe is to find nucleic acid molecules with an equivalent function to those that are explicitly identified herein, or to identify additional family members in the same or other species. This can be done by probing libraries,,such as genomic or cDNA libraries, derived from a source of interest, such as a human, a non-human animal, other eukaryote species, a plant, a prokaryotic species or a virus. The probe may be natural or artificially designed using methods recognised in the art (for example, Ausubel et al., [supra]). A nucleic acid probe will preferably possess greater than 15, more preferably greater than 30 and most preferably greater than 50 contiguous bases complementary to a nucleic acid molecule explicitly identified herein.

[0278] In many cases, isolated DNA from cDNA libraries will be incomplete in the region encoding the polypeptide, normally at the 5′ end. Methods available for subsequently obtaining full-length cDNA sequence include RACE (rapid amplification of cDNA ends) as described by Frohman et al., (Proc. Natl. Acad. Sci. USA 85, 8998-9002 (1988)), and restriction-site PCR, which uses universal primers to retrieve unknown nucleic acid sequence adjacent to a known locus (Sarkar, G. (1993) PCR Methods Applic., 2:318-322). “Inverse PCR” may also be used to amplify or to extend sequences using divergent primers based on a known region (Triglia, T. et al., (1988) Nucleic Acids Res. 16:8186). Another method which may be used is “capture PCR”, which involves PCR amplification of DNA fragments adjacent to a known sequence in human and yeast artificial chromosome DNA (Lagerstrom, M. et al., (1991) PCR Methods Applic., 1:111-119). Another method which may be used to retrieve unknown sequences is that of Parker, J. D. et al., (1991); Nucleic Acids Res. 19:3055-3060). Additionally, one may use PCR, nested primers, and libraries, such as the PromoterFinder™ library (Clontech, Palo Alto, Calif.) to walk genomic DNA. This latter process avoids the need to screen libraries and is useful in finding intron/exon junctions.

[0279] When screening for full-length cDNAs, it is preferable to use libraries that have been size-selected to include larger cDNAs. Also, random-primed libraries are preferable, in that they will contain more sequences that contain the 5′ regions of genes. Use of a randomly primed library may be especially preferable for situations in which an oligo d(T) library does not yield a full-length cDNA. Genomic libraries may be useful for extension of sequence into 5′ non-transcribed regulatory regions.

[0280] In one embodiment of the invention, a nucleic acid molecule according to the invention may be used for chromosome localisation. In this technique, a nucleic acid molecule is specifically targeted to, and can hybridise with, a particular location on an individual human chromosome. The mapping of relevant sequences to chromosomes is an important step in the confirmatory correlation of those sequences with the gene-associated disease. Once a sequence has been mapped to a precise chromosomal location, the physical position of the sequence on the chromosome can be correlated with genetic map data. Such data are found in, for example, McKusick, Mendelian Inheritance in Man (available on-line through Johns Hopkins University Welch Medical Library). The relationships between genes and diseases that have been mapped to the same chromosomal region are then identified through linkage analysis (coinheritance of physically adjacent genes). This provides-valuable information to investigators searching for disease genes using positional cloning or other gene discovery techniques. Once the disease or syndrome has been crudely localized by genetic linkage to a particular genomic region, any sequences mapping to that area may represent associated or regulatory genes for further investigation. The nucleic acid molecule may also be used to detect differences in the chromosomal location due to translocation, inversion, etc. among normal, carrier, or affected individuals.

[0281] Nucleic acid molecules of the present invention are also valuable for tissue localisation. Such techniques facilitate the determination of expression patterns of the polypeptide in tissues by detection of the mRNAs that encode them. These techniques include in situ hybridization techniques and nucleotide amplification techniques, such as PCR. Results from these studies provide an indication of the normal functions of the polypeptide in the organism, as well as highlighting the involvement of a particular gene in a disease state or abnormal physiological condition.

[0282] In addition, comparative studies of the normal expression pattern of mRNAs with that of mRNAs encoded by a mutant gene provide valuable insights into the role of mutant polypeptides in disease. Such inappropriate expression may be of a temporal, spatial or quantitative nature.

[0283] Vectors

[0284] The nucleic acid molecules of the present invention may be incorporated into vectors for cloning (for example, pBluescript made by Stratagene) or expression purposes. Vectors containing a nucleic acid molecule explicitly identified herein (or a variant thereof) form another aspect of this invention. The nucleic acid molecule may be inserted into an appropriate vector by any variety of well known techniques such as those described in Sambrook et al. [supra]. Generally, the encoding gene can be placed under the control of a control element such as a promoter, ribosome binding site or operator, so that the DNA sequence encoding the desired polypeptide is transcribed into RNA in the transformed host cell.

[0285] Vectors may be derived from various sources including, but not limited to bacterial plasmids, bacteriophage, transposons, yeast episomes, insertion elements, yeast chromosomal elements, viruses for example, baculoviruses and SV40 (simian virus), vaccinia viruses, adenoviruses, fowl pox viruses, pseudorabies viruses, lentiviruses and retroviruses, or combinations thereof, such as those derived from plasmid and bacteriophage genetic elements, including cosmids and phagemids. Human, bacterial and yeast artificial chromosomes (HACs, BACs and YACs respectively) may also be employed to deliver larger fragments of DNA than can be contained and expressed in a plasmid.

[0286] Examples of retroviruses include but are not limited to: murine leukaemia virus (MLV), human immunodeficiency virus (HIV), equine infectious anaemia virus (EIAV), mouse mammary tumour virus (MMTV), Rous sarcoma virus (RSV), Fujinami sarcoma virus (FuSV), Moloney murine leukaemia virus (Mo-MLV), FBR murine osteosarcoma virus (FBR MSV), Moloney murine sarcoma virus (Mo-MSV), Abelson murine leukaemia virus (A-MLV), Avian myelocytomatosis virus-29 (MC29), and Avian erythroblastosis virus (AEV). A detailed list of retroviruses may be found in Coffin et al (“Retroviruses” 1997 Cold Spring Harbour Laboratory Press Eds: J M Coffin, S M Hughes, H E Varmus pp 758-763).

[0287] Lentiviruses can be divided into primate and non-primate groups. Examples of primate lentiviruses include but are not limited to: the human immunodeficiency virus (HIV), the causative agent of human auto-immunodeficiency syndrome (AIDS), and the simian immunodeficiency virus (SIV). The non-primate lentiviral group includes the prototype “slow virus” visna/maedi virus (VMV), as well as the related caprine arthritis-encephalitis virus (CAEV), equine infectious anaemia virus (EIAV) and the more recently described feline immunodeficiency virus (FIV) and bovine immunodeficiency virus (BIV).

[0288] A distinction between the lentivirus family and other types of retroviruses is that lentiviruses have the capability to infect both dividing and non-dividing cells (Lewis et al 1992 EMBO. J 11: 3053-3058; Lewis and Emerman 1994 J. Virol. 68: 510-516). In contrast, other retroviruses—such as MLV—are unable to infect non-dividing cells such as those that make up, for example, muscle, brain, lung and liver tissue.

[0289] A vector may be configured as a split-intron vector. A split intron vector is described in PCT patent applications WO 99/15683 and WO 99/15684.

[0290] If the features of adenoviruses are combined with the genetic stability of retroviruses/lentiviruses then essentially the adenovirus can be used to transduce target cells to become transient retroviral producer cells that could stably infect neighbouring cells. Such retroviral producer cells engineered to express an antigen of the present invention can be implanted in organisms such as animals or humans for use in the treatment of angiogenesis and/or cancer.

[0291] Poxvirus vectors are also suitable for use in accordance with the present invention. Pox viruses are engineered for recombinant gene expression and for the use as recombinant live vaccines. This entails the use of recombinant techniques to introduce nucleic acids encoding foreign antigens into the genome of the pox virus. If the nucleic acid is integrated at a site in the viral DNA which is non-essential for the life cycle of the virus, it is possible for the newly produced recombinant pox virus to be infectious, that is to say to infect foreign cells and thus to express the integrated DNA sequence. The recombinant pox virus prepared in this way can be used as live vaccines for the prophylaxis and/or treatment of pathologic and infectious disease.

[0292] For vaccine delivery, preferred vectors are vaccinia virus vectors such as MVA or NYVAC. Most preferred is the vaccinia strain modified virus ankara (MVA) or a strain derived therefrom. Alternatives to vaccinia vectors include avipox vectors such as fowlpox or canarypox known as ALVAC and strains derived therefrom which can infect and express recombinant proteins in human cells but are unable to replicate.

[0293] Bacterial vectors may be also used, such as salmonella, listeria and mycobacteria.

[0294] Vectors containing the relevant nucleotide sequence may enter the host cell by a variety of methods well known in the art and described in many standard laboratory manuals (such as Sambrook et al., [supra], Ausubel et al., [supra], Davis et al., Basic Methods in Molecular Biology (1986)). Methods include calcium phosphate transfection, cationic lipid-mediated transfection, DEAE-dextran mediated transfection, electroporation, microinjection, scrape loading, transduction, and ballistic introduction or infection.

[0295] Host Cells

[0296] The choice of host cells is often dependent on the vector type used as a carrier for the nucleic acid molecule of the present invention. Bacteria and other microorganisms are particularly suitable hosts for plasmids, cosmids and expression vectors generally (for example, vectors derived from the pBR322 plasmid), yeast are suitable hosts for yeast expression vectors, insect cell systems are suitable host for virus expression vectors (for example, baculovirus) and plant cells are suitable hosts for vectors such as the cauliflower mosaic virus (CaMV) and tobacco mosaic virus (TMV). Other expression systems include using animal cells (for example, with the LentiVectors™, Oxford BioMedica) as a host cell or even using cell-free translating systems. Some vectors, such as “shuttle vectors” may be maintained in a variety of host cells. An example of such a vector would be pEG 202 and other yeast two-hybrid vectors which can be maintained in both yeast and bacterial cells (see Ausubel et al., [supra] and Gyuris, J., Cell, 75, 791-803).

[0297] Examples of suitable bacterial hosts include Streptococci, Staphylococci, Escherichia coli, Streptomyces and Bacillus subtilis cells. Yeast and fungal hosts include Saccharomyces cerevisiae and Aspergillus cells. Mammalian cell hosts include many immortalized cell lines available from the American Type Culture Collection (ATCC) such as CHO (Chinese Hamster Ovary) cells, HeLa cells, BHK (baby hamster kidney) cells, monkey kidney cells, C127, 3T3, BHK, HEK 293, Bowes melanoma and human hepatocellular carcinoma (for example, Hep G2) cells. Insect host cells that are used for baculovirus expression include Drosophila S2 and Spodoptera Sf9 cells. Plant host cells include most plants from which protoplasts be isolated and cultured to give whole regenerated plants. Practically, all plants can be regenerated from cultured cells or tissues, including but not limited to all major species of sugar cane, sugar beet, cotton, fruit and other trees, legumes and vegetables.

[0298] Expression Systems

[0299] Also included in present invention are expression vectors that comprise a nucleic acid molecule as described above. Expression vectors and host cells are preferably chosen to give long term, high yield production and stable expression of the recombinant polypeptide and its variants.

[0300] Expression of a polypeptide can be effected by cloning an encoding nucleic acid molecule into a suitable expression vector and inserting this vector into a suitable host cell. The positioning and orientation of the nucleic acid molecule insert with respect to the regulatory sequences of the vector is important to ensure that the coding sequence is properly transcribed and translated. Alternatively, control and other regulatory sequences may be ligated onto the nucleic acid molecule of this invention prior to its insertion into the expression vector. In both cases, the sequence of the nucleic acid molecule may have to be adjusted in order to effect correct transcription and translation (for example, addition of nucleotides may be necessary to obtain the correct reading frame for translation of the polypeptide from its encoding nucleic acid molecule).

[0301] A nucleic acid molecule of the invention may comprise control sequences that encode signal peptides or leader sequences. These sequences may be useful in directing the translated polypeptide to a variety of locations within or outside the host cell, such as to the lumen of the endoplasmic reticulum, to the nucleus, to the periplasmic space, or into the extracellular environment. Such signals may be endogenous to the nucleic acid molecules of the invention, or may be a heterologous sequence. These leader or control sequences may be removed by the host during post-translational processing.

[0302] A nucleic acid molecule of the present invention may also comprise one or more regulatory sequences that allow for regulation of the expression of polypeptide relative to the growth of the host cell. Alternatively, these regulatory signals may be due to a heterologous sequence from the vector. Stimuli that these sequences respond to include those of a physical or chemical nature such as the presence or absence of regulatory compounds, changing temperatures or metabolic conditions. Regulatory sequences as described herein, are non-translated regions of sequence such as enhancers, promoters and the 5′ and 3′ untranslated regions of genes. Regulatory sequences interact with host cellular proteins that carry out translation and transcription. These regulatory sequences may vary in strength and specificity. Examples of regulatory sequences include those of constitutive and inducible promoters. In bacterial systems, an example of an inducible promoter is the hybrid lacZ promoter of the Bluescript phagemid (Stratagene, LaJolla, Calif.) or pSport1TM plasmid (Gibco BRL). The baculovirus polyhedrin promoter may be used in insect cells.

[0303] An example of a preferred expression system is the lentivirus expression system, for example, as described in International patent application WO98/17815.

[0304] Detection of Uptake of Vectors by the Host Organism

[0305] Various methods are known in the art to detect the uptake of a nucleic acid or vector molecule by a host cell and/or the subsequent successful expression of the encoded polypeptide (see for example Sambrook et al., [supra]).

[0306] Vectors frequently have marker genes that can be easily assayed. Thus, vector uptake by a host cell can be readily detected by testing for the relevant phenotype. Markers include, but are not limited to those coding for antibiotic resistance, herbicide resistance or nutritional requirements. The gene encoding dihydrofolate reductase (DHFR) for example, confers resistance to methotrexate (Wigler, M. et al. (1980) PNAS 77:3567-70) and the gene npt confers resistance to the aminoglycosides neomycin and G-418 (Colbere-Garapin, F. et al (1981) J. Mol. Biol. 150:1-14). Additional selectable genes have been described, examples of which will be clear to those of skill in the art.

[0307] Markers however, only indicate that a vector has been taken up by a host cell but does not distinguish between vectors that contain the desired nucleic acid molecule, and those that do not. One method of detecting for the said nucleic acid molecule is to insert the relevant sequence at a position that will disrupt the transcription and translation of a marker gene. These cells can then be identified by the absence of a marker gene phenotype. Alternatively, a marker gene can be placed in tandem with a sequence encoding a polypeptide of the invention under the control of a single promoter. Expression of the marker gene in response to induction or selection usually indicates expression of the tandem gene as well.

[0308] More direct and definitive methods to detect the presence of the nucleic acid molecule of the present invention include DNA-DNA or DNA-RNA hybridization with a probe comprising the relevant antisense molecule, as described above. More direct methods to detect polypeptide expression include protein bioassays for example, fluorescence activated cell sorting (FACS), immunoassay techniques such as ELISA or radioimmunoassays.

[0309] Alternative methods for detecting or quantitating the presence of the nucleic acid molecule or polypeptide of this invention include membrane, solution or chip-based technologies (see Hampton, R. et al., (1990) Serological Methods, a Laboratory Manual, APS Press, St Paul, Minn.) and Maddox, D. E. et al., (1983) J. Exp. Med, 158, 1211-1216).

[0310] Transgenic Animals

[0311] In another embodiment of this invention, a nucleic acid molecule according to the invention may be used to create a transgenic animal, most commonly a rodent. The modification of the animal's genome may either be done locally, by modification of somatic cells or by germ line therapy to incorporate inheritable modifications. Such transgenic animals may be particularly useful in the generation of animal models for drug molecules effective as modulators of the polypeptides of the present invention.

[0312] Polypeptide Purification

[0313] A polypeptide according to the invention may be recovered and purified from recombinant cell cultures by methods including, but not limited to cell lysis techniques, ammonium sulphate precipitation, ethanol precipitation, acid extraction, anion or cation chromatography, phosphocellulose chromatography, hydrophobic interaction chromatography, affinity chromatography, hydroxylapatite chromatography and lectin chromatography, high performance liquid chromatography (HPLC) or fast performance liquid chromatography (FPLC). The polypeptide may need refolding after purification or isolation and many well known techniques are available that will help regenerate an active polypeptide conformation.

[0314] Many expression vectors are commercially available that aid purification of the relevant polypeptide. These include vectors that join the sequence encoding the polypeptide to another expressed sequence creating a fused protein that is easier to purify. Ways in which these fused parts can facilitate purification of the polypeptide of this invention include fusions that can increase the solubility of the polypeptide, joining of metal chelating peptides (for example, histidine-tryptophan modules) that allow for purification with immobilized metals, joining of protein A domains which allow for purification with immobilized immunoglobulins and the joining of the domain that is utilized in the FLAGS extension/affinity purification system (Immunex Corp., Seattle, Wash.). Fusion of the polypeptide of this present invention with a secretion signal polypeptide may also aid purification. This is because the medium into which the fused polypeptide has been secreted can subsequently be used to recover and purify the expressed polypeptide.

[0315] If necessary, these extraneous polypeptides often comprise a cleavable linker sequence which allows the polypeptide to be isolated from the fusion. Cleavable linker sequences between the purification domain and the polypeptide of the invention include those specific for Factor Xa or for enterokinase (Invitrogen, San Diego, Calif.). One such expression vector provides for expression of a fusion protein containing the polypeptide of the invention fused to several histidine residues preceding a thioredoxin or an enterokinase cleavage site. The histidine residues facilitate purification by IMAC (immobilized metal ion affinity chromatography as described in Porath, J. et al. (1992), Prot. Exp. Purif. 3: 263-281), while the thioredoxin or enterokinase cleavage site provides a means for purifying the polypeptide from the fusion protein. A discussion of vectors that contain fusion proteins is provided in Kroll, D. J. et al. (1993; DNA Cell Biol. 12:441-453).

[0316] Assays

[0317] Another aspect of this invention includes assays that may be carried out using a polypeptide or nucleic acid molecule according to the invention. Such assays may be for many uses including the development of drug candidates, for diagnostic purposes or for the gathering of information for therapeutics.

[0318] If the polypeptide is to be expressed for use in screening assays, generally it is preferred that it be produced at the surface of the host cell in which it is expressed. In this event, the host cells may be harvested prior to use in the screening assay, for example using techniques such as fluorescence activated cell sorting (FACS) or immunoaffinity techniques. If the polypeptide is secreted into the medium, the medium can be recovered in order to recover and purify the expressed polypeptide. If polypeptide is produced intracellularly, the cells must first be lysed before the polypeptide is recovered.

[0319] The polypeptide of the invention can be used to screen libraries of compounds in any of a variety of drug screening techniques. Such compounds may activate (agonise) or inhibit (antagonize) the level of expression of the gene or the activity of the polypeptide of the invention and form a further aspect of the present invention. Examples of suitable compounds are those which are effective to alter the expression of a natural gene which encodes a polypeptide of the invention or to regulate the activity of a polypeptide of the invention.

[0320] Agonist or antagonist compounds may be isolated from, for example, cells, cell-free preparations, chemical libraries or natural product mixtures. These agonists or antagonists may be natural or modified substrates, ligands, enzymes, receptors or structural or functional mimetics. For a suitable review of such screening techniques, see Coligan et al., Current Protocols in Immunology 1(2):Chapter 5 (1991).

[0321] Potential agonists or antagonists include small organic molecules, peptides, polypeptides and antibodies that bind to the polypeptide of the invention and thereby modulate its activity. In this fashion, binding of the polypeptide to normal cellular binding molecules may be potentiated or inhibited, such that the normal biological activity of the polypeptide is enhanced or prevented.

[0322] The polypeptide of the invention that is employed in such a screening technique may be free in solution, affixed to a solid support, borne on a cell surface or located intracellularly. In general, such screening procedures may involve using appropriate cells or cell membranes that express the polypeptide that are contacted with a test compound to observe binding, or stimulation or inhibition of a functional response. The functional response of the cells contacted with the test compound is then compared with control cells that were not contacted with the test compound. Such an assay may assess whether the test compound results in a signal generated by activation of the polypeptide, using an appropriate detection system. Inhibitors of activation are generally assayed in the presence of a known agonist and the effect on activation by the agonist in the presence of the test compound is observed.

[0323] Alternatively, simple binding assays may be used, in which the adherence of a test compound to a surface bearing the polypeptide is detected by means of a label directly or indirectly associated with the test compound or in an assay involving competition with a labelled competitor. In another embodiment, competitive drug screening assays may be used, in which neutralising antibodies that are capable of binding the polypeptide specifically compete with a test compound for binding. In this manner, the antibodies can be used to detect the presence of any test compound that possesses specific binding affinity for the polypeptide.

[0324] Assays may also be designed to detect the effect of added test compounds on the production of mRNA encoding the polypeptide in cells. For example, an ELISA may be constructed that measures secreted or cell-associated levels of polypeptide using monoclonal or polyclonal antibodies by standard methods known in the art, and this can be used to search for compounds that may inhibit or enhance the production of the polypeptide from suitably manipulated cells or tissues. The formation of binding complexes between the polypeptide and the compound being tested may then be measured.

[0325] Another technique for drug screening which may be used provides for high throughput screening of compounds having suitable binding affinity to the polypeptide of interest (see International patent application WO84/03564). In this method, large numbers of different small test compounds are synthesised on a solid substrate, which may then be reacted with the polypeptide of the invention and washed. One way of immobilising the polypeptide is to use non-neutralising antibodies. Bound polypeptide may then be detected using methods that are well known in the art. Purified polypeptide can also be coated directly onto plates for use in the aforementioned drug screening techniques.

[0326] A polypeptide according to the invention may be used to identify membrane-bound or soluble receptors, through standard receptor binding techniques that are known in the art, such as ligand binding and crosslinking assays in which the polypeptide is labelled with a radioactive isotope, is chemically modified, or is fused to a peptide sequence that facilitates its detection or purification, and incubated with a source of the putative receptor (for example, a composition of cells, cell membranes, cell supernatants, tissue extracts, or bodily fluids). The efficacy of binding may be measured using biophysical techniques such as surface plasmon resonance and spectroscopy. Binding assays may be used for the purification and cloning of the receptor, but may also identify agonists and antagonists of the polypeptide, that compete with the binding of the polypeptide to its receptor. Standard methods for conducting screening assays are well understood in the art.

[0327] A typical polypeptide-based assay might involve contacting the appropriate cell(s) or cell membrane(s) expressing the polypeptide with a test compound. In such assays, a polypeptide according to the invention may be free in solution, affixed to a solid support, borne on a cell surface or located intracellularly. Any response to the test compound, for example a binding response, a stimulation or inhibition of a functional response may then be compared with a control where the cell(s) or cell membrane(s) was/were not contacted with the test compound.

[0328] A binding response could be measured by testing for the adherence of a test compound to a surface bearing a polypeptide according to the invention. The test compound may aid polypeptide detection by being labelled, either directly or indirectly. Alternatively, the polypeptide itself may be labelled, for example, with a radioisotope, by chemical modification or as a fusion with a peptide or polypeptide sequence that will facilitate polypeptide detection. Alternatively, a binding response may be measured, for example, by performing a competition assay with a labelled competitor or vice versa. One example of such a technique is a competitive drug screening assay, where neutralising antibodies that are capable of specifically binding to the polypeptide compete with a test compound for binding. In this manner, the antibodies may be used to detect the presence of any test compound that possesses specific binding affinity for the polypeptide. Alternative binding assay methods are well known in the art and include, but are not limited to, cross-linking assays and filter binding assays. The efficacy of binding may be measured using biophysical techniques including surface plasmon resonance and spectroscopy.

[0329] High throughput screening is a type of assay which enables a large number of compounds to be searched for any significant binding activity to the polypeptide of interest (see patent application WO84/03564). This is particularly useful in drug screening. In this scenario, many different small test compounds are synthesised on to a solid substrate. The polypeptide is then introduced to this substrate and the whole apparatus washed. The polypeptide is then immobilized by, for example, using non-neutralising antibodies. Bound polypeptide may then be detected using methods that are well known in the art. Purified polypeptide may also be coated directly onto plates for use in the aforementioned drug screening techniques.

[0330] Assay methods that are also included within the terms of the present invention are those that involve the use of the genes and polypeptides of the invention in overexpression or ablation assays. Such assays involve the manipulation of levels of these genes/polypeptides in cells and assessment of the impact of this manipulation event on the physiology of the manipulated cells. For example, such experiments reveal details of signaling and metabolic pathways in which the particular genes/polypeptides are implicated, generate information regarding the identities of polypeptides with which the studied polypeptides interact and provide clues as to methods by which related genes and proteins are regulated.

[0331] As described above, such assay methods may preferably be designed so as to screen for ligands which binds specifically to, and which preferably inhibits the hypoxia-induced activity of, a polypeptide according to any one of the above-described aspects of the invention. Such a ligand may, for example, be an antibody that is immunospecific for the polypeptide in question.

[0332] In the case of the EGLN3 (BAB15101; SEQ ID NO: 85), the EGLN3 splice variant (SEQ ID NO: 85a), EGLN1 (c1orf12; AAG34568; SEQ ID NO: 89), CAB81622, or SM20 polypeptide, that are herein implicated as hypoxia-responsive prolyl 4-hydroxylases, examples of suitable ligand compounds for screening in the above assays include substrate-based inhibitors, such as 3-exomethyleneproline peptide like compounds (Tandon M et al (1998) Substrate specificity of human prolyl-4-hydroxylase, Bioorg. Med. Chem. Lett. 8:1139-44), derivatives of proline, derivatives of 4(S)hydroxy proline, derivatives of 4-keto proline. Further, in view of the fact that the activity of proline-4-hydroxylase is iron, 2-oxoglutarate and asorbic acid dependent (Kivirikko K I, Pihlajaniemi T. (1998) Collagen hydroxylases and the protein disulfide isomerase subunit of prolyl 4-hydroxylases. Adv Enzymol Relat Areas Mol Biol. 72:325-98) and the activity of HIF targeting prolyl hydroxylases such as those recited above is also dependent on these co-factors (Bruick R K, McKnight S L. (2001) A conserved family of prolyl-4-hydroxylases that modify HIF. Science. 294(5545):1337-40), examples of suitable compounds include cofactor-based inhibitors such as 2-oxoglutarate analogues, ascorbic acid analogues and iron chelators.

[0333] In the case of the PI3-kinase polypeptides whose sequences are presented in SEQ ID NOS: 527, 529 and 531, such a ligand may, for example, be a compound that modulates the interaction between the Hu.BCAP-A polypeptide or a functional equivalent thereof, a tyrosine kinase protein and/or a PI3-kinase protein and thereby modulates PI3-kinase activity. Preferably, the interaction between the Hu.BCAP-A polypeptide or a functional equivalent thereof, a tyrosine kinase protein and/or a PI3-kinase protein is inhibited, such that PI3-kinase activity is also inhibited. Assays for PI3-kinase activity are known in the art. For example, different phosphorylated forms of proteins that are substrate for PI3-kinase can be assayed using antibodies that are specific for those forms. For example, the kinase PKB/AKT is activated by two phosphorylation events, both of which are induced by the phosphoinositide dependent kinase PDK1 following PI3-kinase activation. Antibodies that are specific for the various phosphorylated forms of PKB/AKT are available in the art, such as from New England Biolabs (UK) Ltd of Hitchin, Hertfordshire, who supply the following antibodies: catalogue number 9272 can be used to measure total-levels of phosphorylated and un-phosphorylated PKB/AKT. Antibody catalogue number 9271 can be used to measure levels of PKB/AKT phosphorylated at Ser473. Antibody catalogue number 9275 can be used to measure levels of PKB/AKT phosphorylated at Thr308. Other suitable antibodies will be known to those of skill in the art. Immunoassays to measure these proteins can be carried out in many different and convenient ways, as is well known to those skilled in the art. For example, for the purpose of screening modulators of BCAP function, enzyme-linked immunoassays can be carried out at high throughput, such as in 96 or 384-well plates, or at higher or lower well density if required by the number of assays to be performed. These assays could be based on the use of NEB 9272 as an unlabelled antibody immobilized in the wells to capture all forms of PKB/AKT, and then fluorescently-labelled or enzyme-linked NEB9271 or NEEB9275 could be used to measure Ser473 or Thr308-phosphorylated PKB/AKT, respectively. Alternatively, appropriate labelled antibody could be used to visualize unphosphorylated or phosphorylated forms of PKB/AKT in adherent cells in flat-bottomed wells or discrete regions of a slide that may have received micro-dispensed treatments scanned with a fluorescence microscope.

[0334] It is also known that PI3-kinase complex phosphorylates distinct lipids both in vitro and in vivo. In vitro, the PI3-kinase complex can phosphorylate phosphatidylinositol (PI), phosphatidylinositol 4-phosphate (PI4P) and phophatidylinositol 4,5-bisphosphate (PI(4,5)P₂) on the D3 hydroxyl group of the inositol ring, producing phosphatidylinositol 3-phosphate (PI3P), phosphatidylinositol 3,4-bisphosphate (PI(3,4)P₂) and phosphatidylinositol 3,4,5-trisphosphate (PI(3,4,5)P₃) (see Kapellar et al., Bioessays 16:565-576 (1994); and Stephens et al., Biochim. Biophys. Acta 1179:27-75 (1993). Activation of the PI3-kinase complex in cells results in elevated levels of PI(3,4)P2 and PI(3,4,5)P₃, but not PI3P (see Auger et al., Cell 57:167-175 (1989); Stephens et al., Nature 351:33-39 (1991); Traynor-Kaplan et al., Nature 334:353-356 (1988); and Traynor-Kaplan J. Biol. Chem. 264:15668-15673 (1989)). For determination of the amount of PI3P or PI(3,4)P2 formed, one may employ any number of a variety of well known assay methods. For example, HPLC analysis can be readily used to identify quantitatively the above described reaction products, using, e.g., tritiated substrates, and the like. Similarly, on a more qualitative level, thin layer chromatography (TLC) can also be used to identify reaction products. The levels of the above described reaction products produced in the presence and absence of the test compound are then compared. Where the presence of the test compound results in an increase or decrease in the level of the reaction product produced by the polypeptide, it is indicative that the test compound is an agonist or antagonist of PI3-kinase activity, respectively, and more particularly, the activity of the Hu.BCAP-A polypeptide and/or its functional equivalents, as described herein.

[0335] For example, assay methods may comprise incubating a mixture of PI or PI4P and a polypeptide selected from the group consisting of Hu.BCAP-A or a functional equivalent thereof, PI3-kinase, a tyrosine kinase protein or biologically active fragments thereof, in the presence and absence of the test compound. The mixture is then assayed to determine the amount of PI3P or PI(3,4)P₂ produced in the presence and absence of the test compound. The amount of PI3P or PI(3,4)P₂ produced in the presence of the test compound is compared to the amount of PI3P or PI(3,4)P₂ produced in the absence of the test compound. An increase or decrease in the amount of PI3P or PI(3,4)P₂ in the presence of the test compound is indicative that the test compound is an agonist or antagonist of Hu.BCAP-A-mediated PI3-kinase activity, respectively.

[0336] More generally, screening methods according to the invention will concentrate in the early stages on finding candidate compounds, initially by screening libraries of between 30,000 to 50,000 compounds. Once candidates have been identified, subsequent stages involve the verification of the structures of these compounds, for example, using techniques known to those of skill in the art such as High Performance Liquid Chromatography (HPLC)/Mass Spectrometry for dissolved stock and HPLC/Mass Spectrometry and Nuclear magnetic resonance Spectroscopy for solid stock (see Mass Spectrometry in Drug Discovery; Rossi & Sinz (Eds) ISBN: 0824706072; Nuclear Magnetic Resonance Spectroscopy, Nelson). Subsequent follow-up studies will concentrate on evaluating the efficacy of the compounds, generating IC₅₀ values (1-30 μM) from high throughput enzyme inhibition assays (such as using scintillation proximity assays (available from Amersham Pharmacia Biotech) or equivalent techniques). If available, in silico pharmacokinetics studies may be used to expedite the screening process (suitable Bioinformatics expertise may be sought from companies such as Inpharmatica Ltd, London and De Novo Ltd, Cambridge).

[0337] Hit to lead optimisation and validation involves evaluating a selection (approximately 200) of the best candidates which yielded ˜1 μM potency (IC50=1 μM) in a high throughput enzyme inhibition assay. Other suitable techniques will involve the determination of the specific absorption rate (SAR) by Caco 2 intestinal cell absorption assay (MultiScreen Caco-2 Assay system available from Millipore; BD BioCoat HTS Caco-2 assay system available from BD Biosicences), the determination of the selectivity of the candidate compounds (against related family members) and evaluating the reversibility and kinetics of binding of these compounds. The studies may also involve the measurement of the in vitro metabolic stability of the candidate compounds in primary human and rat liver microsomes; measurement of the in vitro inhibition and induction of human and mammalian cytochrome P450s; the determination of in vitro toxicity (such as by using MTT assays [available from Roche] and LDH assays [available from Cambridge Biosicence]).

[0338] Lead optimisation and validation then takes compounds that satisfy the following criteria for functional assay and in vivo pharmacokinetics studies: 1 nM potency in a high throughput enzyme inhibition assay; solubility of ˜0.1 mg/ml on lead compounds; functionality in the presence of human serum albumin (HSA) and/or rodent serum albumin (RSA); 1000× selectivity against family members; demonstrated in vitro absorption in Caco2 intestinal cells; demonstrated in vitro metabolic stability in primary human and rat liver S9 microsomes; profiles of human and mammalian cytochrome P450 inhibition/induction having been determined (a variety of C¹⁴-labelled substrates are available for P450 assays from Amersham Biosciences); mechanism of interaction with target having been determined; the most advantageous pharmacokinetics specificity profile. This latter test may involve a toxicity test for drugs, such as the Human Ether-a-go-go gene (HERG) potassium channel assay that is a cardiotoxicity test (Compton et al., (1996) Genetically defined therapy of inherited long-QT syndrome. Correction of abnormal repolarization by potassium. Circulation. 94(5): 1018-22), the FLIPR Membrane Potential assay test (kit available from Molecular Devices Ltd) or alternative in vitro mutagenicity tests (such as the Ames test [Benedict et al., (1977) Mutagenicity of cancer chemotherapeutic agents in the Salmonella/microsome test. Cancer Res. 37:2209-13]; kit available from Litron Laboratories] or the clastogenicity assay [Sister Chromatid Exchange assay kit is available from Litron Laboratories]).

[0339] Functional (cell-based) assays are then developed to validate the lead compounds. Further studies involve an investigation of in vivo pharmacokinetics data in animal experiments; in vivo positive pharmacokinetics results correlated with in vitro data and in silico data; in vivo activity in a functional animal model; in vivo safety studies—central nervous system (CNS)/cardiovascular (CVS) toxicity profiles should be determined.

[0340] Another aspect of this invention provides for any screening kits that are based or developed from any of the aforementioned assays.

[0341] C. Pharmaceuticals

[0342] A further aspect of the invention provides a pharmaceutical composition suitable for modulating hypoxia and/or ischaemia, comprising a therapeutically-effective amount of a polypeptide, a nucleic acid molecule, vector or ligand as described above, in conjunction with a pharmaceutically-acceptable carrier. A composition containing a polypeptide, nucleic acid molecule, ligand or any other compound of this present invention (herein known as X) is considered to be “substantially free of impurities” (herein known as Y) when X makes up more than 85% mass per mass of the total [X+Y] mass. Preferably X comprises at least 90% of the total X+Y mass. More preferably X comprises at least 95%, 98% and most preferably 99% of the total X+Y mass.

[0343] Carriers

[0344] Carrier molecules may be genes, polypeptides, antibodies, liposomes or indeed any other agent provided that the carrier does not itself induce toxicity effects or cause the production of antibodies that are harmful to the individual receiving the pharmaceutical composition. Further examples of known carriers include polysaccharides, polylactic acids, polyglycolic acids and inactive virus particles. Carriers may also include pharmaceutically acceptable salts such as mineral acid salts (for example, hydrochlorides, hydrobromides, phosphates, sulphates) or the salts of organic acids (for example, acetates, propionates, malonates, benzoates). Pharmaceutically acceptable carriers may additionally contain liquids such as water, saline, glycerol, ethanol or auxiliary substances such as wetting or emulsifying agents, pH buffering substances and the like. Carriers may enable the pharmaceutical compositions to be formulated into tablets, pills, dragees, capsules, liquids, gels, syrups, slurries, suspensions to aid intake by the patient. A thorough discussion of pharmaceutically acceptable carriers is available in Remington's Pharmaceutical Sciences (Mack Pub. Co., N.J. 1991).

[0345] Dosage

[0346] The amount of component X in the composition should also be in therapeutically effective amounts. The phrase “therapeutically effective amounts” used herein refers to the amount of agent needed to treat, ameliorate, or prevent (for example, when used as a vaccine) a targeted disease or condition. An effective initial method to determine a “therapeutically effective amount” may be by carrying out cell culture assays (for example, using neoplastic cells) or using animal models (for example, mice, rabbits, dogs or pigs). In addition to determining the appropriate concentration range for X to be therapeutically effective, animal models may also yield other relevant information such as preferable routes of administration that will give maximum effectiveness. Such information may be useful as a basis for patient administration. A “patient” as used in herein refers to the subject who is receiving treatment by administration of X. Preferably, the patient is human, but the term may also include animals.

[0347] The therapeutically-effective dosage will generally be dependent on the patient's status at the time of adminstration. Factors that may be taken into consideration when determining dosage include the severity of the disease state in the patient, the general health of the patient, the age, weight, gender, diet, time and frequency of administration, drug combinations, reaction sensitivities and the patient's tolerance or response to the therapy. The precise amount can be determined by routine experimentation but may ultimately lie with the judgement of the clinician. Generally, an effective dose will be from 0.01 mg/kg (mass of drug compared to mass of patient) to 50 mg/kg, preferably 0.05 mg/kg to 10 mg/kg. Compositions may be administered individually to a patient or may be administered in combination with other agents, drugs or hormones.

[0348] Routes of Administration

[0349] Uptake of a pharmaceutical composition of the invention by a patient may be initiated by a variety of methods including, but not limited to enteral, intra-arterial, intrathecal, intramedullary, intramuscular, intranasal, intraperitoneal, intravaginal, intravenous, intraventricular, oral, rectal (for example, in the form of suppositories), subcutaneous, sublingual, transcutaneous applications (for example, see WO98/20734) or transdermal means.

[0350] Gene guns or hyposprays may also be used to administer the pharmaceutical compositions of the invention. Typically, the therapeutic compositions may be prepared as injectables, either as liquid solutions or suspensions; solid forms suitable for solution in, or suspension in, liquid vehicles prior to injection may also be prepared. Direct delivery of the compositions can generally be accomplished by injection, subcutaneously, intraperitoneally, intravenously or intramuscularly, or delivered to the interstitial space of a tissue. The compositions can also be administered into a lesion. Dosage treatment may be a single dose schedule or a multiple dose schedule.

[0351] Inhibition of Excessive Activity

[0352] If a particular disease state is partially or completely caused by an inappropriate excess in the activity of a polypeptide according to the invention, several approaches are available for inhibiting this activity.

[0353] One approach comprises administering to a patient an inhibitor compound (antagonist) along with a pharmaceutically acceptable carrier in an amount effective to inhibit the function of the polypeptide, such as by blocking the binding of a ligand, substrate, enzyme, receptor, or by inhibiting a second signal, and thereby alleviating the abnormal condition. Such an antagonist molecule may, for example, be an antibody. Most preferably, such antibodies are chimeric and/or humanised to minimise their immunogenicity, as previously described.

[0354] In another approach, soluble forms of the polypeptide that retain binding affinity for the ligand, substrate, enzyme, receptor, in question, may be administered to the patient to compete with the biological activity of the endogenous polypeptide. Typically, the polypeptide may be administered in the form of a fragment that retains a portion that is relevant for the desired biological activity.

[0355] In an alternative approach, expression of the gene encoding the polypeptide can be inhibited using expression blocking techniques, such as by using antisense nucleic acid molecules (as described above), either internally generated or separately administered. Modifications of gene expression may be effected by designing complementary sequences or antisense molecules (DNA, RNA, or PNA) to the control, 5′ or regulatory regions (signal sequence, promoters, enhancers and introns) of the gene encoding the polypeptide. Similarly, inhibition can be achieved using “triple helix” base-pairing methodology. Triple helix pairing is useful because it causes inhibition of the ability of the double helix to open sufficiently for the binding of polymerases, transcription factors, or regulatory molecules. Recent therapeutic advances using triplex DNA have been described in the literature (Gee, J. E. et al. (1994) In: Huber, B. E. and B. I. Carr, Molecular and Immunologic Approaches, Futura Publishing Co., Mt. Kisco, N.Y.). The complementary sequence or antisense molecule may also be designed to block translation of mRNA by preventing the transcript from binding to ribosomes. Such oligonucleotides may be administered or may be generated in situ from expression in vivo.

[0356] Gene silencing approaches may also be undertaken to down-regulate endogenous expression of a gene. RNA interference (RNAi) (Elbashir, S M et al., Nature 2001, 411, 494-498) is one method of sequence specific post-transcriptional gene silencing that may be employed. Short dsRNA oligonucleotides are synthesised in vitro and introduced into a cell. The sequence specific binding of these dsRNA oligonucleotides triggers the degradation of target mRNA, reducing or ablating target protein expression. This phenomenon is termed post-transcriptional gene silencing (PTGS). Small interfering RNAs (siRNAs) are 21-23 nucleotide dsRNAs that mediate and can induce PTGS in mammalian cells. siRNAs appear to be produced in vivo by cleavage of dsRNA introduced directly or via a transgene or virus. Amplification by an RNA-dependent RNA polymerase (RdRP) may occur in some organisms. siRNAs are incorporated into the RNA-induced silencing complex (RISC), guiding the complex to the homologous endogenous mRNA where the complex cleaves the transcript. The most efficient silencing occurs with siRNA duplexes of 21-mers sense and antisense strands, but paired to have a 2-base 3′ overhang and 19 bases of overlap (see The Max Plank Institute siRNA User Guide; http address www.mpibpc.gwdg.de/index_en.html). The optimum target DNA sequence is AA(N19)TT. The design of such molecules is within the ability of the skilled artisan. In the case of the EGLN3 proteins described herein (SEQ ID NOS: 85 and 85a), for example, the sequence AATCTGCTGGCCTTGTTCATTTT conforms to the above guide, and we recommend this site in the BCAP cDNA sequence for intervention via siRNA. Thus the two single-stranded RNA molecules which would comprise the siRNA agent are: (sense) 5′-UCUGCUGGCCUUGUUCAUUUU and (antisense) 5′-AAUGAACAAGGCCAGCAGAUU. The corresponding siRNA sequence can also be expressed as a hairpin with an appropriate linker from a vector within the cell (see Miyagishi et al, Nature Biotechnol 2002 20:497-500).

[0357] In addition, expression of a polypeptide according to the invention may be prevented by using a ribozyme specific to the encoding mRNA sequence for the polypeptide. Ribozymes are catalytically active RNAs that can be natural or synthetic (see for example Usman, N, et al., Curr. Opin. Struct. Biol (1996) 6(4), 527-33). Synthetic ribozymes can be designed to specifically cleave mRNAs at selected positions thereby preventing translation of the mRNAs into functional polypeptide. Ribozymes may be synthesised with a natural ribose phosphate backbone and natural bases, as normally found in RNA molecules. Alternatively the ribozymes may be synthesised with non-natural backbones, for example, 2′-O-methyl RNA, to provide protection from ribonuclease degradation and may contain modified bases.

[0358] Efficacy of the gene silencing approaches assessed above may be assessed through the measurement of polypeptide expression (for example, by Western blotting), and at the RNA level using TaqMan-based methodologies.

[0359] RNA molecules may be modified to increase their intracellular stability and half-life. Possible modifications include, but are not limited to, the addition of flanking sequences at the 5′ and/or 3′ ends of the molecule or the use of phosphorothioate or 2′ O-methyl rather than phosphodiesterase linkages within the backbone of the molecule. This concept is inherent in the production of PNAs and can be extended in all of these molecules by the inclusion of non-traditional bases such as inosine, queosine and butosine, as well as acetyl-, methyl-, thio- and similarly modified forms of adenine, cytidine, guanine, thymine and uridine that are not as easily recognised by endogenous endonucleases.

[0360] Activation of a Polypeptide Activity

[0361] If a particular disease state is partially or completely due to a lowered level of biological activity from a polypeptide according to the invention, various methods may be used. An example of such a method includes administering a therapeutically effective amount of compound that can activate (i.e. an agonist) or cause increased expression of the polypeptide concerned. Administration of such a compound may be via any of the methods described previously.

[0362] Gene Therapy

[0363] Another aspect of the present invention provides for gene therapy methods involving nucleic acid molecules identified herein. Gene therapy may be used to affect the endogenous production of the polypeptide of the present invention by relevant cells in a patient. For example, gene therapy can be used permanently to treat the inappropriate production of a polypeptide by replacing a defective gene with the corrected therapeutic gene.

[0364] Treatment may be effected either in vivo or ex vivo. Ex vivo gene therapy generally involves the isolation and purification of the patient's cells, introduction of the therapeutic gene into the cells and finally, the introduction of the genetically-altered cells back into the patient. In vivo gene therapy does not require the isolation and purification of patient cells prior to the introduction of the therapeutic gene into the patient. Instead, the therapeutic gene can be packaged for delivery into the host. Gene delivery vehicles for in vivo gene therapy include, but are not limited to, non-viral vehicles such as liposomes, replication-competent and replication-deficient viruses (for example, adenovirus as described by Berkner, K. L., in Curr. Top. Microbiol. Immunol., 158, 39-66 (1992)) or adeno-associated virus (AAV) vectors as described by Muzyczka, N., in Curr. Top. Microbiol. Immunol., 158, 97-129 (1992) and U.S. Pat. No. 5,252,479. Alternatively, “naked DNA” may be directly injected into the bloodstream or muscle tissue as a form of in vivo gene therapy.

[0365] One example of a strategy for gene therapy including a nucleic acid molecule of this present invention may be as follows. A nucleic acid molecule encoding a polypeptide of the invention is engineered for expression in a replication-defective or replication-competent vector, such as a retroviral vector. This expression construct may then be isolated and introduced into a packaging cell transduced with a retroviral plasmid vector containing RNA encoding the polypeptide, such that the packaging cell now produces infectious viral particles containing the gene of interest. These producer cells may be administered to a patient for engineering cells in vivo and expression of the polypeptide in vivo (see Chapter 20, Gene Therapy and other Molecular Genetic-based Therapeutic Approaches, (and references cited therein) in Human Molecular Genetics (1996), T Strachan and A P Read, BIOS Scientific Publishers Ltd).

[0366] Genetic delivery of antibodies that bind to polypeptides according to the invention may also be effected, for example, as described in International patent application WO98/55607.

[0367] Vaccines

[0368] A further embodiment of the present invention provides that the polypeptides .or nucleic acid molecules identified may be used in the development of vaccines. Where the aforementioned polypeptide or nucleic acid molecule is a disease-causing agent, vaccine development can involve the raising of antibodies against such agents. Where the aforementioned polypeptide or nucleic acid molecule is that is upregulated, vaccine development can involve the raising of antibodies or T cells against such agents (as described in WO00/29428).

[0369] Vaccines according to the invention may either be prophylactic (i.e. prevents infection) or therapeutic (i.e. treats disease after infection). Such vaccines comprise immunising antigen(s), immunogen(s), polypeptide(s), protein(s) or nucleic acid, usually in combination with pharmaceutically-acceptable carriers as described above. Additionally, these carriers may function as immunostimulating agents (“adjuvants”). Furthermore, the antigen or immunogen may be conjugated to a bacterial toxoid, such as a toxoid from diphtheria, tetanus, cholera, H. pylori, and other pathogens.

[0370] Vaccination processes may involve the use of heterologous vectors eg: prime with MVA and boost with DNA.

[0371] Since polypeptides may be broken down in the stomach, vaccines comprising polypeptides are preferably administered parenterally (for instance, subcutaneous, intramuscular, intravenous, or intradermal injection). Formulations suitable for parenteral administration include aqueous and non-aqueous sterile injection solutions that may contain anti-oxidants, buffers, bacteriostats and solutes which render the formulation isotonic with the blood of the recipient, and aqueous and non-aqueous sterile suspensions which may include suspending agents or thickening agents.

[0372] The vaccine formulations of the invention may be presented in unit-dose or multi-dose containers. For example, sealed ampoules and vials and may be stored in a freeze-dried condition requiring only the addition of the sterile liquid carrier immediately prior to use. The dosage will depend on the specific activity of the vaccine and can be readily determined by routine experimentation.

[0373] The technology referred to as jet injection (see, for example, http address www.powderject.com) may also be useful in the formulation of vaccine compositions.

[0374] In accordance with this aspect of the present invention, polypeptides can be delivered by viral or non-viral techniques. Non-viral delivery systems include but are not limited to DNA transfection methods. Here, transfection includes a process using a non-viral vector to deliver a antigen gene to a target mammalian cell. Typical transfection methods include electroporation, nucleic acid biolistics, lipid-mediated transfection, compacted nucleic acid-mediated transfection, liposomes, immunoliposomes, lipofectin, cationic agent-mediated, cationic facial amphiphiles (CFAs) (Nature Biotechnology 1996 14; 556), multivalent cations such as spermine, cationic lipids or polylysine, 1, 2,-bis (oleoyloxy)-3-(trimethylammonio) propane (DOTAP)-cholesterol complexes (Wolff and Trubetskoy 1998 Nature Biotechnology 16: 421) and combinations thereof.

[0375] Viral delivery systems include but are not limited to adenovirus vectors, adeno-associated viral (AAV) vectors, herpes viral vectors, influenza, retroviral vectors, lentiviral vectors or baculoviral vectors, venezuelan equine encephalitis virus (VEE), poxviruses such as: canarypox virus (Taylor et al 1995 Vaccine 13:539-549), entomopox virus (Li Y et al 1998 XIIth International Poxvirus Symposium p144. Abstract), penguine pox (Standard et al. J Gen Virol. 1998 79:1637-46) alphavirus, and alphavirus based DNA vectors.

[0376] In addition to the use of polypeptide-based vaccines, this aspect of the invention includes the use of genetically-based vaccines, for example, those vaccines that are effective through eliciting the expression of a particular gene (either endogenous or exogenously derived) in a cell, so targeting this cell for destruction by the immune system of the host organism.

[0377] A number of suitable methods for vaccination and vaccine delivery systems are described in International patent application WO00/29428.

[0378] D. Diagnostics

[0379] Another aspect of the present invention provides for the use of a nucleic acid molecule identified herein as a diagnostic reagent.

[0380] For example, a nucleic acid molecule may be detected or isolated from a patient's tissue and used for diagnostic purposes. “Tissue” as defined herein refers to blood, urine, any matter obtained from a tissue biopsy or any matter obtained from an autopsy. Genomic DNA from the tissue sample may be used directly for detection of a hypoxia-related condition. Alternatively, the DNA may be amplified using methods such as polymerase chain reaction (PCR), the ligase chain reaction (LCR), strand displacement amplification (SDA), or other amplification techniques (see Saiki et al., Nature, 324, 163-166 (1986); Bej, et al., Crit. Rev. Biochem. Molec. Biol., 26, 301-334 (1991); Birkenmeyer et al., J. Virol. Meth., 35, 117-126 (1991) and Brunt, J., Bio/Technology, 8, 291-294 (1990)). Such diagnostics are particularly useful for prenatal and even neonatal testing.

[0381] A method of diagnosis of disease using a polynucleotide may comprise assessing the level of expression of the natural gene and comparing the level of encoded polypeptide to a control level measured in a normal subject that does not suffer from the disease or physiological condition that is being tested. The diagnosis may comprise the following steps:

[0382] a) contacting a sample of tissue from the patient with a nucleic acid probe under stringent conditions that allow the formation of a hybrid complex between a nucleic acid molecule of the invention and the probe;

[0383] b) contacting a control sample with said probe under the same conditions used in step a); and

[0384] c) detecting the presence of hybrid complexes in said samples;

[0385] wherein detection of differing levels of the hybrid complex in the patient sample compared to levels of the hybrid complex in the control sample is indicative of the dysfunction.

[0386] A further aspect of the invention comprises a diagnostic method comprising the steps of:

[0387] a) obtaining a tissue sample from a patient being tested for disease;

[0388] b) isolating a nucleic acid molecule according to the invention from said tissue sample; and

[0389] c) diagnosing the patient for disease by detecting the presence of a mutation in the nucleic acid molecule which is associated with disease.

[0390] To aid the detection of nucleic acid molecules in the above-described methods, an amplification step, such as PCR, may be included. An example of this includes detection of deletions or insertions indicative of the dysfunction by a change in the size of the amplified product in comparison to the normal genotype. Point mutations can be identified by hybridising amplified DNA to labelled RNA of the invention or alternatively, labelled antisense DNA sequences of the invention. Perfectly matched sequences can be distinguished from mismatched duplexes by RNase digestion or by assessing differences in melting temperatures. The presence or absence of the mutation in the patient may be detected by contacting DNA with a nucleic acid probe that hybridizes to the DNA under stringent conditions to form a hybrid double-stranded molecule, the hybrid double-stranded molecule having an unhybridised portion of the nucleic acid probe strand at any portion corresponding to a mutation associated with disease; and detecting the presence or absence of an unhybridised portion of the probe strand as an indication of the presence or absence of a disease-associated mutation in the corresponding portion of the DNA strand.

[0391] Point mutations and other sequence differences between the reference gene and “mutant” genes can be identified by other well-known techniques, such as direct DNA sequencing or single-strand conformational polymorphism, (see Orita et al., Genomics, 5, 874-879 (1989)). For example, a sequencing primer may be used with double-stranded PCR product or a single-stranded template molecule generated by a modified PCR. The sequence determination is performed by conventional procedures with radiolabelled nucleotides or by automatic sequencing procedures with fluorescent-tags. Cloned DNA segments may also be used as probes to detect specific DNA segments. The sensitivity of this method is greatly enhanced when combined with PCR. Further, point mutations and other sequence variations, such as polymorphisms, can be detected as described above, for example, through the use of allele-specific oligonucleotides for PCR amplification of sequences that differ by single nucleotides.

[0392] DNA sequence differences may also be detected by alterations in the electrophoretic mobility of DNA fragments in gels, with or without denaturing agents, or by direct DNA sequencing (for example, Myers et al., Science (1985) 230:1242). Sequence changes at specific locations may also be revealed by nuclease protection assays, such as RNase and S1 protection or the chemical cleavage method (see Cotton et al., PNAS. USA (1985) 85: 4397-4401).

[0393] In addition to conventional gel electrophoresis and DNA sequencing, mutations such as microdeletions, aneuploidies, translocations, inversions, can also be detected by in situ analysis (see, for example, Keller et al., DNA Probes, 2nd Ed., Stockton Press, New York, N.Y., USA (1993)), that is, DNA or RNA sequences in cells can be analysed for mutations without need for their isolation and/or immobilisation onto a membrane. FISH is presently the most commonly applied method and numerous reviews of FISH have appeared (see, for example, Trachuck et a., Science, 250, 559-562 (1990), and Trask et aL., Trends, Genet., 7, 149-154 (1991)).

[0394] Arrays

[0395] In another embodiment of the invention, an array of oligonucleotide probes comprising a nucleic acid molecule according to the invention can be constructed to conduct efficient screening of genetic variants, mutations and polymorphisms. Array technology methods are well known and have general applicability and can be used to address a variety of questions in molecular genetics including gene expression, genetic linkage, and genetic variability (see for example: M.Chee et al., Science (1996), Vol 274, pp 610-613).

[0396] In one embodiment, the array is prepared and used according to the methods described in WO95/11995 (Chee et al); Lockhart, D. J. et al. (1996) Nat. Biotech. 14: 1675-1680); and Schena, M. et al. (1996) PNAS 93: 10614-10619). Oligonucleotide pairs may range from two to over one million. The oligomers are synthesized at designated areas on a substrate using a light-directed chemical process. The substrate may be paper, nylon or other type of membrane, filter, chip, glass slide or any other suitable solid support. In another aspect, an oligonucleotide may be synthesized on the surface of the substrate by using a chemical coupling procedure and an ink jet application apparatus, as described in PCT application W095/251116 (Baldeschweiler et al). In another aspect, a “gridded” array analogous to a dot (or slot) blot may be used to arrange and link cDNA fragments or oligonucleotides to the surface of a substrate using a vacuum system, thermal, UV, mechanical or chemical bonding procedures. An array, such as those described above, may be produced by hand or by using available devices (slot blot or dot blot apparatus), materials (any suitable solid support), and machines (including robotic instruments), and may contain 8, 24, 96, 384, 1536 or 6144 oligonucleotides, or any other number between two and over one million which lends itself to the efficient use of commercially-available instrumentation.

[0397] Diagnostics Using Polypeptides or mRNA

[0398] In addition to the methods discussed above, diseases may be diagnosed by methods comprising determining, from a sample derived from a subject, an abnormally decreased or increased level of polypeptide or mRNA. Decreased or increased expression can be measured at the RNA level using any of the methods well known in the art for the quantitation of polynucleotides, such as, for example, nucleic acid amplification, for instance PCR, RT-PCR, RNase protection, Northern blotting and other hybridization methods.

[0399] Assay techniques that can be used to determine levels of a polypeptide of the present invention in a sample derived from a host are well-known to those of skill in the art and are discussed in some detail above (including radioimmunoassays, competitive-binding assays, Western Blot analysis and ELISA assays). One example of this aspect of the invention provides a diagnostic method which comprises the steps of: (a) contacting a ligand as described above with a biological sample under conditions suitable for the formation of a ligand-polypeptide complex; and (b) detecting said complex.

[0400] Protocols such as ELISA, RIA, and FACS for measuring polypeptide levels may additionally provide a basis for diagnosing altered or abnormal levels of polypeptide expression. Normal or standard values for polypeptide expression are established by combining body fluids or cell extracts taken from normal mammalian subjects, preferably humans, with antibody to the polypeptide under conditions suitable for complex formation The amount of standard complex formation may be quantified by various methods, such as by photometric means.

[0401] Antibodies which specifically bind to a polypeptide of the invention may be used for the diagnosis of conditions or diseases characterized by expression of the polypeptide, or in assays to monitor patients being treated with the polypeptides, nucleic acid molecules, ligands and other compounds of the invention. Antibodies useful for diagnostic purposes may be prepared in the same manner as those described above for therapeutics. Diagnostic assays for the polypeptide include methods that utilize the antibody and a label to detect the polypeptide in human body fluids or extracts of cells or tissues. The antibodies may be used with or without modification, and may be labelled by joining them, either covalently or non-covalently, with a reporter molecule. A wide variety of reporter molecules known in the art may be used, several of which are described above.

[0402] Quantities of polypeptide expressed in subject, control and disease samples from biopsied tissues are compared with the standard values. Deviation between standard and subject values establishes the parameters for diagnosing disease. Diagnostic assays may be used to distinguish between absence, presence, and excess expression of polypeptide and to monitor regulation of polypeptide levels during therapeutic intervention. Such assays may also be used to evaluate the efficacy of a particular therapeutic treatment regimen in animal studies, in clinical trials or in monitoring the treatment of an individual patient.

[0403] Diagnostic Kits

[0404] A diagnostic kit of the present invention may comprise:

[0405] (a) a nucleic acid molecule of the present invention;

[0406] (b) a polypeptide of the present invention; or

[0407] (c) a ligand of the present invention.

[0408] In reply to: one aspect of the invention, a diagnostic kit may comprise a first container containing a nucleic acid probe that hybridizes under stringent conditions with a nucleic acid molecule according to the invention; a second container containing primers useful for amplifying the nucleic acid molecule; and instructions for using the probe and primers for facilitating the diagnosis of disease. The kit may further comprise a third container holding an agent for digesting unhybridised RNA.

[0409] In an alternative aspect of the invention, a diagnostic kit may comprise an array of nucleic acid molecules, an array of antibody molecules, and/or an array of polypeptide molecules, as discussed in more detail above.

[0410] Such kits will be of use in diagnosing a disease or susceptibility to disease, particularly inflammation, oncology, or cardiovascular disease.

[0411] Various aspects and embodiments of the present invention will now be described in more detail by way of example, with particular reference to polypeptides regulated differentially under hypoxic conditions as opposed to normoxic conditions. It will) be appreciated that modification of detail may be made without departing from the scope of the invention.

### BRIEF DESCRIPTION OF THE DRAWINGS

[0412] FIG. 1 shows a scatter plot, showing normalized signal intensities in hypoxia versus normoxia, with each dot representing a single gene.

[0413] FIG. 2: Hypoxia responses amplified by HIF1alpha overexpression. Data shown is the average of 4 repeat experiments. Values represent fold change as compared to untreated cells (condition 1). Error bars represent standard error of the mean.

[0414] FIG. 3: Hypoxia responses amplified by EPAS1 overexpression. Data shown is the average of 4 repeat experiments. Values represent fold change as compared to untreated cells (condition 1). Error bars represent standard error of the mean.

[0415] FIG. 4: Hypoxia responses amplified by HIF1alpha/EPAS1 overexpression. Data shown is the average of 4 repeat experiments. Values represent fold change as compared to untreated cells (condition 1). Error bars represent standard error of the mean.

[0416] FIG. 5 shows genes that are induced by hypoxia to a greater degree in resting macrophages, as compared to activated macrophages. Error bars show the standard deviation from both repeat experiments and multiple exposures from single experiments. These data are not shown in table form. All bars are ratios of mRNA expression in hypoxia/normoxia. These are calculated separately for resting (light bars) and activated (dark bars) macrophages, and do not illustrate differences resulting from activation in nonnoxia.

[0417] FIG. 6 shows genes which are induced by hypoxia to a greater degree in activated macrophages, compared to resting macrophages.

[0418] FIG. 7 shows genes that are repressed by hypoxia to a greater degree in activated macrophages.

[0419] For FIGS. 8, 9a, 9c, 10-32a, 32d and 33-52, mRNA levels, determined from a custom gene array, of particular genes are shown on the Y-axis, expressed as a value as compared to the median expression level of this gene throughout all samples. Eleven primary human cell types as shown on the x-axis were cultured in normoxia (black), or exposed to hyopxia for 6 hr (grey) or 18 hr (white).

[0420] FIG. 8: Ecotropic viral integration site 2A (SEQ ID NO::475/476).

[0421] FIG. 9a: Novel PI-3-kinase adapter (SEQ ID NO::79/80); Image clone accession R62339.

[0422] FIG. 9b: TaqMan Real-time Q-RT-PCR data for Novel PI-3-kinase adapter (SEQ ID NO::79/80); Image clone accession R62339.

[0423] FIG. 9c: IMAGE clone acc R59598 (Syk).

[0424] FIG. 10: Regulator of G-protein signalling 1 (SEQ ID NO::375/376)

[0425] FIG. 11: GM2 ganglioside activator protein (SEQ ID NO::389/390)

[0426] FIG. 12: hypothetical protein PRO0823 (SEQ ID NO::21/22)

[0427] FIG. 13: CYP1 (cytochrome P450, subfamily XXVIIB) (SEQ ID NO::339/340)

[0428] FIG. 14: Alpha-2-macroglobulin (SEQ ID NO::405/406)

[0429] FIG. 15: Interleukin 1 receptor antagonist (SEQ ID NO::357/358)

[0430] FIG. 16: SCYA3L (SEQ ID NO::469/470)

[0431] FIG. 17: CFFM4 (SEQ ID NO::433/434)

[0432] FIG. 18: Pleckstrin (SEQ ID NO::431/432)

[0433] FIG. 19: CYP1B1 (SeqID:325/326)

[0434] FIG. 20: CYP1B1 (SeqID:137/138)

[0435] FIG. 21: hypothetical protein FLJ13511 (SeqID:163/164)

[0436] FIG. 22: Hematopoietic Zinc finger protein (SeqID:17/18)

[0437] FIG. 23: Osteopontin (SeqID:267/268)

[0438] FIG. 24: Osteopontin (SeqID:267/268)

[0439] FIG. 25: Adipophilin (SeqID:313/314)

[0440] FIG. 26: Adipophilin (SeqID:313/314)

[0441] FIG. 27: Adipophilin (SeqID:313/314)

[0442] FIG. 28: Adipophilin (SeqID:313/314)

[0443] FIG. 29: hypothetical protein FLJ22690 (SeqID:205/206)

[0444] FIG. 30: cDNA DKFZp586E1624 (SeqID: 65/66)

[0445] FIG. 31: EST (SeqID:197/198)

[0446] FIG. 32a: EGL nine (C.elegans) homolog 3 (SeqID:85/86)

[0447] FIG. 32b: Gene expression profiles in macrophages with and without activation. mRNA levels, determined from a custom gene array, of c1orf12 are shown on the Y-axis, expressed as a value compared to the mean value of a set of control genes on each array (per-chip normalisation). All cells were human macrophages, cultured either without cytokines or with IL-10 or with the combination of IFN□ and LPS in normoxia and hypoxia.

[0448] FIG. 32c: Gene expression profiles in macrophages with and without activation. mRNA levels, determined from a custom gene array, of EGLN3 are shown on the Y-axis, expressed as a value compared to the mean value of a set of control genes on each array (per-chip normalisation). All cells were human macrophages, cultured either without cytokines or with IL-10 or with the combination of IFN□ and LPS in normoxia and hypoxia.

[0449] FIG. 32d: C1orf12 (SeqID: 89.90)

[0450] FIG. 32e: The effect of EPAS/HIF overexpression on expression of the gene C1orf12 EGLN genes using a custom gene array. mRNA expression levels of the gene c1ORF12 as determined by the custom array, in response to hypoxia and adenoviral over-expression of HIF or EPAS are shown. Experimental conditions are as follows: #1 no adeno/normoxia; #2 empty adeno (low dose)/normoxia; #3 empty adeno (high dose)/normoxia; #4 empty adeno (low dose)/hypoxia; #5 empty adeno (high dose)/hypoxia; #6 HIF-1 adeno (low dose)/hypoxia; #7 HIF-1 adeno (high dose)/hypoxia; #8 EPAS adeno (low dose)/hypoxia; #9 EPAS adeno (high dose)/hypoxia. Error bars are the standard error of the mean.

[0451] FIG. 32f: The effect of EPAS/HIF overexpression on expression of the gene EGLN3 gene using a custom gene array. mRNA expression levels of the gene EGLN3 as determined by the custom array, in response to hypoxia and adenoviral over-expression of HIF or EPAS are shown. Experimental conditions are as follows: #1 no adeno/normoxia; #2 empty adeno (low dose)/normoxia; #3 empty adeno (high dose)/normoxia; #4 empty adeno (low dose)/hypoxia; #5 empty adeno (high dose)/hypoxia; #6 HIF-1 adeno (low dose)/hypoxia; #7 HIF-1 adeno (high dose)/hypoxia; #8 EPAS adeno (low dose)/hypoxia; #9 EPAS adeno (high dose)/hypoxia. Error bars are the standard error of the mean.

[0452] FIG. 32g: The effect of EPAS/HIF overexpression on expression of the EGLN3 gene using AffyMetrix Hu95 ver2 GeneChips. mRNA expression levels of the gene in response to hypoxia and adenoviral over-expression of HIF or EPAS are shown. Graphs show the mean of two replicate arrays, with error bars as standard deviation. Above each graph, data values are shown, including the normalized values and raw values (the AffyMetrix average difference parameter) and Present/Absent flags.

[0453] FIG. 32h: The effect of EPAS/HIF overexpression on expression of the c1orf12 gene using AffyMetrix Hu95 ver2 GeneChips. mRNA expression levels of the gene in response to hypoxia and adenoviral over-expression of HIF or EPAS are shown. Graphs show the mean of two replicate arrays, with error bars as standard deviation. Above each graph, data values are shown, including the normalized values and raw values (the AffyMetrix average difference parameter) and Present/Absent flags.

[0454] FIG. 32i: Flag immunocytochemistry in HEK293T cells

[0455] FIG. 32j: Human Cardiomyocyte Caspase Activity after 72 hours transduction with EIAV-ELG9-Homolog 3

[0456] FIG. 32k: Qualitiative RT PCR of EGLN3 isoforms in various primary cell types. Cell types are as follows: “Adipocytes” (Clonetics CC-2568; derived from subcutaneous adult adipose tissue), “Cardiomyocyte” (Clonetics CC-2582; derived from fetal tissue; prior to experimentation cultured in minimal medium: DMEM, 4% Horse serum), “HUVEC” (TCS CellWorks ZHC-2101 human umbilical vein endothelial cells), “Dermal fibroblast” (Clonetics CC-2511 dermal fibroblasts derived from adult tissue), “Macrophage” (derived from human blood as described elsewhere in the specification), “Mammary epithelium” (Clonetics CC-2551; derived from adult tissue), “Monocyte” (derived from human blood as described elsewhere in the specification but without the 7 day differentiation culture period), “SHSY5Y” (neuroblastoma-derived cell line SH-SY5Y), “Renal epithelial” (Clonetics CC-2556; derived from fetal tissue), “SKM” skeletal muscle myocyte (Clonetics CC-2561; derived from adult tissue).

[0457] “N”=cells growing in normoxia. “6 hr H”=after exposure to 0.1% oxygen for 6 hr. “18 hr H”=after exposure to 0.1% oxygen for 18 hr. “+”=positive control RNA. “−”=no RNA negative control.

[0458] FIG. 32l: Effects of prolyl hydroxylase inhibitors on EGLN3 and the EGLN3 splice variant. Abbreviations are as follows: DAU=daunorubicin; MIMO=L-mimosine; HM=HREluc, MIMO; HH=HIF,HREluc; S1H=SVFL1,HREluc; S1HM=S1H, MIMO; S2H=SVFL2,HREluc; S2HM=S2H, MIMO; S1HH=SVFL1,HIF,HREluc; S1HHM=S1HH, MIMO; S2HH=SVFL2,HIF,HREluc; S2HHM=S2HH, MIMO.

[0459] FIG. 33: Novel Metallothionein (SeqID:83/84)

[0460] FIG. 34: hypothetical protein hqp0376 (SeqID:337/338)

[0461] FIG. 35: Metallothionein 2A (SeqID:265/266)

[0462] FIG. 36: Metallothionein 1G (SeqID:243/244)

[0463] FIG. 37: Metallothionein 1H (SeqID: 239/240)

[0464] FIG. 38: Hepcidin antimicrobial peptide (SeqID:141/142)

[0465] FIG. 39: EST (SeqID: 117/118)

[0466] FIG. 40: hypothetical protein FLJ22622 (SeqID:129/130)

[0467] FIG. 41: TRIP-Br2 (SeqID:31/32)

[0468] FIG. 42: Tumor protein D52 (SeqID:301/302)

[0469] FIG. 43: Semaphorin 4b (SeqID:91/92/92a)

[0470] FIG. 44: Dec-1 (SeqID:371/372)

[0471] FIG. 45: Calgranulin A (SeqID:447/448)

[0472] FIG. 46: ERO1 (S. cerevisiae)-like (SeqID:67/68)

[0473] FIG. 47: hypothetical protein FLJ20500 (SeqID:25/26)

[0474] FIG. 48: N-myc downstream regulated (SeqID:229/230)

[0475] FIG. 49: Decidual protein induced by progesterone (SeqID:387/388)

[0476] FIG. 50: Integrin, alpha 5 (SeqID:379/380)

[0477] FIG. 51: Tissue factor (SeqID:225/226)

[0478] FIG. 52: COX-2 (SeqID:237/238)

[0479] FIG. 53: Genes up-regulated by macrophage activation. Normalized mRNA levels in the 6 experimental conditions (#1 no cytokines/normoxia, #2 no cytokines/hypoxia, #3 IL-10/normoxia, #4 IL-10/hypoxia, #5 LPS/IFN/normoxia, #6 LPS/IFN/hypoxia) are shown as values referenced to the median value of that gene throughout all 6 experimental conditions. Error bars show the standard error of the mean.

[0480] FIG. 54: Genes downregulated by macrophage activation (I)

[0481] FIG. 55: Genes downregulated by macrophage activation (II)

[0482] FIG. 56: Genes downregulated by macrophage activation (III)

[0483] FIG. 57 shows an RNase protection assay for the gene encoding Semaphorin 4b.

[0484] FIG. 58 shows a Northern blot showing the size of the mRNA and tissue distribution for the Semaphorin 4b gene.

### DETAILED DESCRIPTION OF THE INVENTION

### EXAMPLES

[0485] Summary

[0486] Subtracted cDNA libraries were separately prepared for hypoxic macrophages and cardiomyoblasts. This involved harvesting RNA from cells both in normoxia and hypoxia, and preparing cDNA. Subtractive hybridization/suppression PCR was then performed to remove genes from the hypoxic cell cDNA, which are also present in cDNA from normoxic cells. Insert DNA from the libraries was PCR amplified and arrayed onto duplicate membranes. Quantitative hybridizations with pre-library cDNA material (normoxia and hypoxia) were done to identify clones in the libraries that actually contain hypoxia inducible genes. The insert DNA was then sequenced.

[0487] This procedure was done independently for macrophage and cardiomyoblast. The hypoxia inducible genes identified from these different cell types differed widely, with only a minority of these genes being identified from both cell types.

[0488] To characterize the differences between the two tissues further, arrays were produced containing all confirmed hypoxia-inducible genes from the macrophage library. Replicate arrays were hybridised with cDNA from normoxic and hypoxic cardiomyoblasts to allow quantitative evaluation of these genes in the cardiomyoblast. This revealed quantitative differences in the hypoxia induced activation these genes in the two cell types.

[0489] Example 1a

[0490] Comparison of the hypoxic-response between human macrophages and cardiomyoblasts by a subtraction cloning/array screening approach

[0491] Methods/Results

[0492] To isolate human macrophage, monocytes were derived from peripheral blood of healthy human donors. 100 ml bags of buffy coat from the Bristol Blood Transfusion Centre were mixed with an equal volume of RPMI1640 medium (Sigma). This was layered on top of 10 ml ficol-paque (Pharmacia) in 50 ml centrifuge tubes and centrifuged for 25 min at 800×g. The interphase layer was removed, washed in MACS buffer (phosphate buffered saline pH 7.2, 0.5% bovine serum albumin, 2 mM EDTA) and resuspended at 80 microliter per 10n7 cells. To this 20 microliter CD14 Microbeads (Miltenyi Biotec) were added, and the tube incubated at 4 degrees for 15 min. Following this one wash was performed in MACS buffer at 400×g and the cells were resuspended in 3 ml MACS buffer and separated on an LS+MACS Separation Column (Miltenyi Biotec) positioned on a midi-MACS magnet (Miltenyi Biotec). The column was washed with 3×3 ml MACS buffer. The column was removed from the magnet and cells were eluted in 5 ml MACS buffer using a syringe. Cells were washed in culture medium (AIM V (Sigma) supplemented with 2% human AB serum (Sigma), and resuspended at 2×10n5 cells per ml in the same medium and placed in large teflon-coated culture bags (Sud-Laborbedarf GmbH, 82131 Gauting, Germany) and transferred to a tissue culture incubator (37 degrees, 5% CO2) for 7-10 days. During this period monocytes spontaneously differentiate to macrophages. This is confirmed by examining cell morphology using phase contrast microscopy. Cells are removed from the bags by placing at 4 degrees for 30 min and emptying the contents. The cells are then washed and resuspended in culture medium at 5×105 cell/ml and plated out in Primeria 10 cm tissue culture petri dishes (Falcon Becton Dickinson) at 5×10n6 cells per dish. Culture is continued for 16-24 hr to allow cell adherence, prior to experimentation involving hypoxia.

[0493] As an alternative primary cell type human cardiomyoblast cultures were established. Cells derived from the ventricular tissue of newborn or foetal hearts were purchased from BioWhittaker (CC-2582). Growth conditions were used to allow maximum expansion of the cells in vitro, by using a medium rich in growth factors. Under such conditions cardiomyoblast-like cells predominate (the developmental precursor of cardiomyocytes). This has been previously described by Goldman and Wurzel (In Vitro Cell. Dev. Biol. 28A: 109-119 (1992)) and Goldman et al., (1996, Exp.Cell.Res. 228(2): 237-245).

[0494] For these cultures, cells were seeded at 1×10⁶ per T150 flask in human smooth muscle growth medium (TCS CellWorks ZHM-3935) and were expanded in the same medium up to a maximum number of 4 passages. The growth medium is purchased pre-prepared, and includes in the formula, 5% fetal bovine serum, insulin, epidermal growth factor and fibroblast growth factor. Prior to experimentation involving hypoxia, cells were plated onto 10 cm tissue culture petri dishes and allowed to reach confluency.

[0495] For experimentation with hypoxia, for all cell types, an equal number of identical culture dishes were divided into two separate incubators: One at 37 degrees, 5% CO2, 95% air (=Normoxia) and the other at 37 degrees, 5% CO₂, 94.9% Nitrogen, 0.1 % Oxygen (=Hypoxia). After 6 hours culture under these conditions, the dishes were removed from the incubator, placed on a chilled platform, washed in cold PBS and total RNA was extracted using RNazol B (Tel-Test, Inc; distributed by Biogenesis Ltd) following the manufacturer's instructions. Polyadenylated mRNA was extracted from the total RNA using a commercial kit following the manufacturer's instructions (Promega; PolyATract mRNA isolation System IV).

[0496] The hypoxia period of 6 hr was previously determined to be sufficient to allow the induction of known hypoxia-regulated genes, as determined by RNase protection assays. During these preliminary studies it was noted that macrophages, cardiomyoblasts and an additional control cell type, Jurkat T-cells, showed different patterns of gene induction in response to hypoxia:

| | level of hypoxia-induced | | |
|---|---|---|---|
| | increase in mRNA levels | | |
| Known Hypoxia-inducible gene | Macrophage | Myoblast | T-cell |
| phosphoglycerate kinase-1 | none | none | high |
| (PGK) | | | |
| vascular endothelial growth factor-A | high | low | high |
| (VEGF) | | | |
| solute carrier family 2, member 1 | high | low | high |
| (Glut-1) | | | |

[0497] Separate subtracted cDNA populations were generated from mRNA extracted from hypoxic macrophages and hypoxic cardiomyoblasts, using a combination of two kits, purchased from Clontech Laboratories—SMART PCR cDNA synthesis kit and PCR Select cDNA subtraction kit. The manufacturer's instructions were followed for both kits. All diagnostic steps were followed as recommended by the manufacturers. All PCR reactions were done using an Applied Biosystems 9700 with 96-well block, using Applied Biosystems plastics. Driver and tester populations used for subtraction were as below:

| subtracted cDNA | tester | driver |
|---|---|---|
| Subtracted macrophage | macrophage (hypoxia) | macrophage (normoxia) |
| Subtracted cardiomyoblast | cardiomyoblast (hypoxia) | cardiomyoblast (normoxia) |

[0498] The final subtracted cDNA samples were evaluated by performing RT-PCR using the following primers for human beta actin:

| | |
|---|---|
| sense: | TCACCCACACTGTGCCCATCTACGA |
| antisense: | CAGCGGAACCGCTCATTGCCAAATGG |

[0499] This showed that an additional 5 cycles of PCR were required to achieve similar levels of beta actin product from subtracted compared to unsubtracted cDNA, indicating a significant reduction in the representation of a non-regulated gene in the subtracted cDNA. Glyceraldehyde 3-Phosphate dehydrogenase PCR primers, as contained in the kit, were not used.

[0500] The three subtracted cDNA populations were ligated into a plasmid vector (pCRII, Invitrogen) to generate libraries, which were transformed into E.coli (INVαF′, Invitrogen) and plated out onto agar, supplemented with ampicillin and X-Gal, according to standard methods.

[0501] Colonies that are white indicate the presence of a recombinant plasmid, and these were picked into individual wells of 96-well plates containing 100 microliters LB-Ampicillin, and given 3-8 hr growth at 37 degrees. In this way, for each library, up to 15×96-well plates of clones were generated.

[0502] To screen clones for the presence of differentially expressed genes, replicate arrays of plasmid insert DNA were generated on nylon membranes: Firstly, PCR was performed using nested PCR primers 2R and 1, which flank the cDNA insert of each clone (sequence described in the PCR Select kit). The reaction mix also contains 200 uM d(A,T,C,G)TP, Advantage2 polymerase mix (Clontech Laboratories) and supplied 10× buffer. 40 ul reactions were set up in 96-well PCR reaction plates and inoculated with 0.5 ul bacteria from the library plates. 23 cycles of PCR were performed (95 degrees 10 sec; 68 degrees 2 min), and a selection of wells were checked on an agarose gel. In this manner a 96-well plate of insert DNA was generated for each 96-well plate of bacterial clones. Arrays of insert DNA were generated by transferring 4 ul of each well to 384-well plates (Genetix), and denaturing the DNA by adding 4 ul 0.4M NaOH and incubating at 37 degrees for 15 minutes. Bromophenol blue was added to the wells to allow visualisation of arraying. A 384-pin replicator (Genetix) was used to spot small volumes of denatured insert DNA onto dry nylon membranes (Hybond N+, AmershamPharmacia).

[0503] By repeating this operation from the same 384-well plate onto several membranes, matched pairs of membranes were produced, suitable for array screening. A fragment of the beta actin gene was spotted at specific positions of the arrays. Following spotting, the membranes were left at room temperature for 2 hr, re-denatured by placing on chromatography paper wetted with 0.3 M NaOH, neutralized by placing on chromatography paper wetted with 0.5 M Tris pH 7.5, dried at room temperature for 2 hr and crosslinked by exposing to 2000 joules WV radiation. Prior to hybridization, residual salts were removed from the arrays, by washing in hot 0.5% SDS.

[0504] Matched pairs of membranes were hybridised with subtracted cDNA samples; from hypoxic and normoxic cells, to determine the abundance of the genes corresponding to each spotted clone in the cDNA samples. Because the cDNA probes were subtracted, large differences in the hybridization signal for individual spots were apparent, which can be identified by eye. Prior to probe labelling, subtracted cDNA samples were digested with RsaI and run through Qiagen Qiaquick PCR purification columns to remove adapter sequences added during the PCR Select procedure. 25 ng cDNA was labelled with 33P using a commercial kit following the manufacturer's instructions (Promega, Prime-a-gene kit), and unincorporated label was removed using BioRad Biospin-6 columns following adding 2.5 ug yeast tRNA carrier.

[0505] Pre-hybridization, hybridization and washes were performed essentially according to the Research Genetics GeneFilters protocol, but supplementing the hybridization mixture with 10 ug of a cocktail of oligonucleotides complementary to the Clontech PCR Select nested PCR primers (equimolar mix of primers 1 and 2R and their reverse complements).

[0506] Hybridized arrays were exposed to X-ray film or were exposed to a phosphorimager (Molecular Dynamics, Storm) and clones showing gross differences in the hybridization signals with hypoxic compared to normoxic cDNA probes were identified. This procedure was used to process all clones originally picked from the primary libraries and PCR amplified. The selected clones were grouped together onto a single array (referred to here as a secondary array), and were re-screened with cDNA probes which had not been subtracted, to allow a more quantitative though less sensitive, evaluation of the relative abundance of the genes in hypoxia vs. normoxia.

[0507] In this case, probes were ds cDNA generated from the Clontech SMART cDNA synthesis kit (labelled using the Promega Prime-a-gene kit) or were total RNA (labelled according to the Research Genetics GeneFilters protocol), and hybridizations were done according to the Research Genetics GeneFilters protocol.

[0508] Hybridization signals were measured using a phosphorimager and were processed with ArrayVision (Imaging Research Inc) software using multiple beta-actin spots to normalize the quantitation and individual spot background correction. At this stage, the inserts of clones showing consistent up-regulation in hypoxia were sequenced using the 2R primer.

[0509] The identity of the genes were determined using BLAST at the NCBI (NLM, NIH) against the non-redundant data base collection. Where significant matches to human genes were not made, the human EST database was used. For both EST and non-EST hits, identifier numbers were also obtained from the UniGene database.

[0510] The above strategy was used independently for libraries derived from macrophages and from cardiomyoblasts. By screening a relatively large number of clones (several thousand per library), single genes were identified from multiple clones from any individual library. Multiple clones covered either the same or different regions of the genes.

[0511] In the above manner, certain hypoxia-inducible genes were identified from clones only derived from the cardiomyoblast library. These genes are listed in Table 1. Certain hypoxia-inducible genes were identified from clones only derived from the macrophage libraries. These genes are listed in Table 2. Certain hypoxia-inducible genes were identified from clones derived from both macrophage and myoblast libraries. These genes are listed in Table 3.

[0512] It can be seen that Table 3 contains many less genes than either Tables 1 and 2; demonstrating that these cell types have large differences in the genes induced by hypoxia. Importantly, the subtracted libraries for macrophage and cardiomyoblast were constructed in parallel. Therefore, major differences in the spectrum of genes isolated from these libraries are likely to be due to differences in the starting material, rather than due to technical differences in the production of the libraries. Importantly, the genes contained in these tables were confirmed to be hypoxia-regulated in the relevant cell type(s) by the described two-stage array hybridization screening process.

[0513] From Table 3 it is clear that although this subset of genes was found in subtracted libraries from both hypoxic macrophages and cardiomyoblasts, the fold-induction obtained between hypoxia and normoxia, for the different tissues differs widely. For the first 5 genes in this table, the hypoxia response is greater for macrophages, whereas for the last 2 genes it is greater for cardiomyoblasts.

[0514] To test whether genes isolated only in the macrophage-derived subtracted libraries are not responsive to hypoxia in cardiomyoblast, cardiomyoblast cDNA isolated from normoxic and hypoxic cells was hybridised to an array of macrophage-derived clones. These data are presented as a scatter plot, showing normalized signal intensities in hypoxia versus normoxia, with each dot representing a single gene on the array. This plot is presented in FIG. 1. A gene that is not affected by hypoxia will localize around the y=x line, running diagonally through the centre of the graph. From the figure, it can be seen that most genes lie in this region, even though all the genes were responsive to hypoxia in the macrophage (Table 2). There is a subset of genes that lie beneath this region (x>y), representing induction of these genes by hypoxia in the cardiomyoblast.

[0515] Sequence data for the cDNA inserts of clones from our custom subtracted cDNA libraries is available. These are usually short fragments of 300-1000 bp. Some have been resequenced to obtain an accurate full insert sequence (see document “gene sequences/analysis”).

[0516] Several of the genes presented in Tables 1-3 encode hypothetical proteins of unknown function and others have no database matches with protein coding sequence. The work presented here provides some functional annotation for these genes, and potential applications for the treatment of disease. Certain genes, in particular the glycolytic enzymes and transporters, have been hypothesised previously as forming part of the generic hypoxia response. The data provided herein provide solid, validating data for these hypotheses.

[0517] It was surprising to note that cells from our cultures of human ventricle-derived cells, showing a cardiomyoblast-like phenotype, do not support significant induction of the following genes: Lactate dehydrogenase A,, Enolase 1, Phosphoglycerate kinase 1, Triosephosphate isomerase 1. These genes have been identified as being targets of the “ubiquitous” transcription factor HIF-1 alpha (“HIF-1: mediator of physiological and pathophsiological responses to hypoxia” J.Appl.Physiol 88: 1474-1480 (2000)).

### Example 1b

[0518] Preparation of Custom Array

[0519] To confirm the findings presented in Example 1a, and to obtain more accurate and additional data, both the subtracted cDNA library clones and the IMAGE clones identified from the Research Genetics Human GeneFilters have now been fabricated by the authors into an independently produced and verified gene array (referred to herein as the “custom gene array”), composed of PCR-amplified insert DNA. The methods used to produce this array are common in the art, but the key points are summarised below.

[0520] Clones from the subtracted cDNA library were PCR amplified as defined in Example 1a. In many cases, there were multiple cDNA clones corresponding to different regions of the same gene, and all these were represented on the custom gene array. IMAGE clones were obtained from the UK MRC HGMP Resource Centre (Hinxton, Cambridge CB101 SB, UK) and were re-isolated as individual colonies and sequenced to verify the correct identity of the clone. In the majority of cases, the same IMAGE clone identified from the Research Genetics Human GeneFilters was selected, but in some instances these clones were not available and alternatives were selected, corresponding to the same gene.

[0521] Additional genes, with well-defined roles in various disease processes relevant to hypoxia, were also represented on the array, as derived from IMAGE clones. It is well established in the literature that genes with similar functions are often co-regulated at the mRNA level, as determined by microarray data clustering methods (Iyer V R et al, Science. 1999 283(5398):83-7; Eisen M B et al Proc Natl Acad Sci USA. 1998 95(25):14863-8). This allows associations to be made between genes of unknown function (as present in the current specification) to genes of well defined function, in order to add significance to the former.

[0522] Normalisation is a key issue in array analysis. The custom gene array is a single colour type array, and contains a selection of additional IMAGE clones corresponding to genes which were empirically determined not to be affected by hypoxia and which are highly expressed in a wide range of human tissues and cell types. During data analysis, spot intensities were divided by the mean of all the reference genes shown below, each of which was present in quadruplicate on each array.

| Gene | IMAGE clone Acc. |
|---|---|
| FLJ11102 fis clone PLACE1005646 | AA464704 |
| matrix Gla protein | AA155913 |
| guanine nucleotide binding protein alpha stimulating 1 | R43581 |
| DKFZp434A1319 | W74725 |
| cDNA FLJ23280 fis clone HEP07194 | AA669443 |
| beta actin | (in house clone) |
| EF1a-like protein | AI817566 |
| ribosomal protein L37a | W91881 |

[0523] IMAGE clone plasmid miniprep DNA was prepared and PCR amplified with flanking vector primers of the sequences GTTTTCCCAGTCACGACGTTG and TGAGCGGATAACAATTTCACACAG. This was then purified and concentrated by ethanol precipitation, and the presence of a single band and DNA concentration were determined by agarose gel electrophoresis and by digital imaging methods.

[0524] Purified PCR product corresponding to all the clones (IMAGE and non-IMAGE) were normalized to 0.5 mg/ml by dilution. Arrays were fabricated onto Hybond N+ (Amersham) membranes using a BioRobotics TAS arrayer (Biorobotics, Cambridge CB37LW, UK) with a 500 micron pin tool. Using 384-well source plates and a 2×2 arraying format this array was relatively low density, thereby eliminating problems of spot-to-spot signal bleed. Also the large pin size and high source plate DNA concentration improves the sensitivity of detection. Post-arraying denaturation/neutralisation was essentially as described by Bertucci F et al., 1999 (Oncogene 18: 3905-3912).

[0525] Total RNA was extracted from cells using RNeasy (Qiagen) and 7 micrograms RNA was labelled with 100 microCi 33P dCTP using 2 micrograms poly dT (10-20 mer) as primer in a reverse transcription reaction. First strand RNA was then degraded under alkaline contritions, and this was then neutralized with Tris HCl pH 8.0, and the labelled cDNA was purified using BioRad BioSpin-6 chromatography columns. Pre-hybridization was performed in 4 ml Research Genetics MicroHyb solution supplemented with 10 micrograms poly dA (10-20 mer) and 10 micrograms Cot-1 DNA, at 45 degrees for 2-3 hours. The cDNA was then denatured by heating and added to the pre-hybridization, which was continued for 18-20 hr. Washing steps were done as follows: 2×SSC/1% SDS 2×20 min at 50 degrees and 0.5×SSC/1% SDS 10 min at 55 degrees. Arrays were exposed to Amersham Low Energy phosphor screens for 24 hr and scanned using a phosphorimager at 50 micron resolution. Image analysis was done using ArrayVision software (Imaging Research Inc). Tab delimited data files were exported and a full analysis performed using GeneSpring software (Silicon Genetics).

[0526] Using the described methodology a dynamic range of detection of 4 logs and a sensitivity of at least 1/50,000 is obtained, as determined by spike doping titration experiments. Having several technical differences compared to the Research Genetics Human GeneFilters as used in the initial filing, data from the custom gene array is expected to be quantitatively different.

### Example 1c

[0527] Hypoxia Regulation of Gene Expression in Macrophages by Exposing Cells to Hypoxia +/− Additional Signal Amplification.

[0528] The transcription factor HIF-1α, is ubiquitously present in cells and is responsible for the induction of a number of genes in response to hypoxia. This protein is considered a master regulator of oxygen homeostasis (see, for example, Semenza, (1998) Curr. Op. Genetics and Dev. 8:588-594). Although HIF-1a is well known to mediate responses to hypoxia, other transcription factors are also known or suspected to be involved. These include a protein called endothelial PAS domain protein 1 (EPAS1) or HIF-2a, which shares 48% sequence identity with HIF-1a (Tian H, et al. Genes Dev. 1997 11:72-82.). Evidence suggests that EPAS1 is especially important in mediating the hypoxia-response in certain cell types, and it is clearly detectable in human macrophages, suggesting a role in this cell type (Griffiths et al., 2000, Gene Ther., 7(3):255-62).

[0529] As supporting evidence for the hypoxic regulation of the genes contained within this specification, adenoviral vectors were used to overexpress HIF-1α and EPAS1 in primary human macrophages prior to exposure to hypoxia, in order to amplify the response. Because the role of these transcription factors as mediators of the hypoxia response is very well established, any further increases in the inducibility of specific genes resulting from this approach represents credible supporting evidence that those genes are responsive to hypoxia.

[0530] A commercially available system was used herein to produce adenoviral particles involving the adenoviral transfer vector AdApt, the adenoviral genome plasmid AdEasy and the packaging cell line Per-c6 (Crucell, Leiden, The Netherlands). The standard manufacturer's instructions were followed. Three derivatives of the AdApt transfer vector have been prepared, named AdApt ires-GFP, AdApt HIF-1a-ires-GFP and AdApt EPAS1-ires-GFP. In these vectors, for convenience, AdApt was modified such that inserted genes (i.e. HIF-1a or EPAS1) expressed from the powerful cytomegalovirus (CMV) promoter were linked to the green fluorescent protein (gfp) marker, by virtue of an internal ribosome entry site (ires). Therefore presence of green fluorescence provides a convenient indicator of viral expression of HIF-1a or EPAS1 in transduced mammalian cells. The control vector AdApt ires-GFP was used to allow discrimination between effects of the inserted genes (i.e. HIF-1a or EPAS1) to that of potential non-specific effects of adenoviral transduction or GFP expression. Standard subdloning methods were used to construct the adenoviral constructs as described in detail elsewhere (see co-pending, co-owned International patent application PCT/GB01/00758; Example 2).

[0531] The adenoviral transfer vectors AdApt HIF-1a-ires-GFP and AdApt EPAS1-ires-GFP, were verified prior to production of adenoviral particles, for their ability to drive expression of functionally active HIF-1a or EPAS1 protein from the CMV promoter in mammalian cells. This was achieved by transient transfection luciferase-reporter assays as described (Boast K et al Hum Gene Ther. Sep. 1, 1999;10:2197-208).

[0532] Using the aforementioned Introgene adenoviral system, caesium-banded, pure adenoviral particles were produced for each of the vectors AdApt ires-GFP, AdApt HIF-1a-ires-GFP and AdApt EPAS1-ires-GFP. Following the Introgene manual, adenoviral preparations were quantitated by spectrophotometry, yielding values of viral particles (VP) per milliliter.

[0533] Primary human macrophages isolated as described above, were washed and resuspended in DMEM (Gibco, Paisley, UK) supplemented with 4% fetal bovine serum (Sigma). 5×10⁶ cells were plated into nine individual 10 cm Primeria (Falcon) tissue culture dishes containing medium plus adenovirus as shown below (experimental design), to give a total volume of 10 ml per plate. Two doses of adenovirus were used; 5.3×10⁸ viral particles/ml (low) and 1.6×10⁹ viral particles/ml (high). These amounts were chosen following a series of titration experiments. Following culture for 16 hr, during which the macrophages adhere to the plate and are infected by the adenoviral particles, the medium was removed and replaced by IMDM medium (Gibco, Paisley, UK) supplemented with 2% human AB serum. A further 24 hr period of culture was allowed prior to experimentation, to allow gene expression from the transduced adenovirus. Gene transduction was verified by visually assessing gfp expression and expression of the viral HIF-1a and EPAS1 genes was determined by real time quantitative RT-PCR using an ABI Prism 7700 TaqMan and CyberGreen protocol. For the high doses of virus, the total levels of HIF-1a or EPAS1 mRNA present in the transduced cells were increased by 10-30 fold.

[0534] For experimentation with conditions of hypoxia, identical culture dishes were divided into two separate incubators: One at 37 degrees, 5% CO2, 95% air (=Normnoxia; equivalent to 20% Oxygen) and the other at 37 degrees, 5% CO2, 94.9% Nitrogen, 0.1% Oxygen (=Hypoxia). After 6 hours culture under these conditions, the dishes were removed from the incubator, placed on a chilled platform, washed in cold PBS and total RNA was extracted using RNeasy (Qiagen) following the manufacturer's instructions.

[0535] Experimental Design

| | | Adenovirus | |
|---|---|---|---|
| | | amount | |
| | Adenovirus | (low = 5.3 × 10⁸ vp/ml | Oxygen |
| Condition | (type) | high = 1.6 × 10⁹ vp/ml) | (%) |
| 1 | none | none | 20 |
| 2 | AdApt ires-GFP | low | 20 |
| 3 | AdApt ires-GFP | high | 20 |
| 4 | AdApt ires-GFP | low | 0.1 |
| 5 | AdApt ires-GFP | high | 0.1 |
| 6 | AdApt HIF-1a-ires-GFP | low | 0.1 |
| 7 | AdApt HIF-1a-ires-GFP | high | 0.1 |
| 8 | AdApt EPAS1-ires-GFP | low | 0.1 |
| 9 | AdApt EPAS1-ires-GFP | high | 0.1 |

[0536] RNA samples from the experimental conditions shown above were each hybridised to individual copies of the Custom gene array and processed as described earlier. To ensure reproducible data, this was repeated so each RNA sample was hybridised to 4 separate arrays. Therefore a total of 36 arrays were used for this experiment. Data analysis was done taking the mean signal of each spot from the four array replicates of each RNA sample. When displayed graphically, standard error of the mean is displayed as the error bar. Expression values were calculated so that they represent the fold-change ratio as compared to conditional, i.e. untreated cells.

[0537] For genes shown in Table 4 it can be seen that in cells transduced by the control adenovirus AdApt ires-GFP there is a response to hypoxia (conditions 4,5) as compared to in normoxia (conditions 2,3). However this response is significantly greater when the natural hypoxia response is amplified by overexpression of HIF-1alpha from the adenovirus AdApt HIF-1a-ires-GFP (conditions 6,7). Furthermore, this effect is usually dependent on the amount of HIF1alpha overexpression (i.e. greater in condition 7 compared to 6). This same data is displayed graphically in FIG. 2. It can be seen that these genes encode metallothionein proteins. One of these (Nucleotide SEQ ID NO: No. 84; Protein SEQ ID NO: No. 83) is a novel member of the matallothionein family. Several metallothionein genes are known in the art to be activated by hypoxia, supporting the usefulness of this data.

[0538] For genes shown in Table 5 and FIG. 3 it can be seen that in cells transduced by the control adenovirus AdApt ires-GFP there is a response to hypoxia (conditions 4,5) as compared to in normoxia (conditions 2,3). However this response is significantly greater when the natural hypoxia response is amplified by overexpression of EPAS1, from the adenovirus AdApt EPAS1-ires-GFP (conditions 8,9).

[0539] In the case of the protein encoded by SEQ ID NO: No. 24, results are available independently for two separate cDNA clones representing non-overlapping regions of the same full length gene.

[0540] In the case of the protein encoded by SEQ ID NO: No. 86 (EGL nine (C.elegans) homolog 3), additional evidence is described above in support of the function of this protein. Furthermore, real time quantitative RT-PCR analysis of this gene using an ABI Prism 7700 TaqMan and CyberGreen protocol, has been performed, to verify and more accurately quantitate the upregulation of EGL nine (C.elegans) homolog 3 in response to hypoxia and EPAS1, adenoviral overexpression. The main difference between the array-based and real time quantitative RT-PCR methodologies is that the latter is far more sensitive and therefore can detect expression in the off-state (here normoxia) for weakly expressed genes. This data has shown an induction ratio of 819-fold for EGL nine (C.elegans) homolog 3 in response to hypoxia with additional EPAS1 expression, from RNA generated from an independent experiment. This data was normalized to beta actin.

[0541] Similarly another weakly-expressed EPAS1-induced gene, Semaphorin 4b (SEQ ID NO: No. 91/92; see additional discussion above) has been determined using real time quantitative RT-PCR methodology, showing an actin-normalized induction ratio of 30.1 is found (data not shown).

[0542] For the gene shown in Table 6 and FIG. 4 it can be seen that in cells transduced by the control adenovirus AdApt ires-GFP, there is a negative response to hypoxia (conditions 4,5) as compared to in normoxia (conditions 2,3). However, this response is significantly greater when the natural hypoxia response is amplified by overexpression of HIF1alpha or EPAS1 (conditions 6,7,8,9).

### Example 2

[0543] Differences in the Hypoxia Responses of Resting and Activated Macrophages.

[0544] Macrophages accumulate at hypoxic areas in various disease states, including cancer, rheumatoid arthritis, atherosclerosis and wound healing. At these sites macrophages activation is liable to occur, such as in response to T-cell derived gamma interferon. For instance, in atherosclerotic plaques there is an accumulation of both T-cells and macrophages, and these are known to interact with one another (reviewed in Lusis A J, Atherosclerosis. Nature. Sep. 14, 2000;407(6801):233-41).

[0545] It is well established that the macrophage has a significant role in the pathology of the above diseases involving hypoxia, and that most functions of the macrophage (including inflammatory functions) are greatly increased following activation. Therefore any therapeutic strategy aimed at the hypoxic macrophage, needs to also consider the effects of macrophage activation and possible cross talk between the responses to macrophage activation and hypoxia.

[0546] 2.1: Research Genetics Human GeneFilters

[0547] This work was carried out using Research Genetics Human GeneFilters, which contain DNA derived from clones of the IMAGE cDNA collection, representing genes of varying degrees of characterization. A series of 6 arrays of human genes were used (GeneFilters GF200-205), potentially covering a total of 31,104 genes. Generally, single genes are represented only once in these arrays. However, sometimes IMAGE clones initially thought to represent separate genes, upon re-analysis were found to be different regions of the same gene. Here we have presented data for all clones individually, though they possess the same UniGene ID and gene name. An example is hypothetical protein FLJ20037.

[0548] The methodology for Research Genetics arrays is similar in principle to that described for the array screening of clones from subtracted libraries. There are several attributes to this method: Relatively small amounts of RNA can be labelled to make cDNA probes, in a single step reaction, and probes are labelled with the same chemical group (33P), so there are no errors introduced as a result of using different dyes, which may differ in stability etc. Using a Phosphorimager allows detection over a wide range of intensities (over 4 logs). Overall it is interesting to note a recent study, which has favourably re-evaluated the performance of the nylon based array, as compared with the glass-based microarray method (Bertucci F et al, Hum Mol Genet 8:1715-1722 (1999)).

[0549] Experiments were done essentially as described in the Research Genetics GeneFilters protocol. Duplicate copies of each array from the same production batch, were used and hybridised in parallel with labelled RNA isolated from normoxic and hypoxic primary human macrophages. Hybridised arrays were scanned twice using a Molecular Dynamics Storm phosphorimager, and both images were analysed to ensure reproducibility. Furthermore, the experiments were repeated using the same RNA samples, but with different array lot numbers, again to ensure reproducibility.

[0550] Analysis was performed using Research Genetics Pathways software, with normalisation using the ‘all data points’ option. Analyses were output as spreadsheets and filtered to remove data points where the signal intensity was less than 4-fold above the general background for the experimental condition with the higher signal (hypoxia or normoxia depending on whether hypoxia causes induction or repression). Sometimes expression in the lower state was not significantly above background, and the ratio will therefore be underestimated. Ratios were calculated by normalized signal intensity in hypoxia divided by normoxia. Changes were verified visually from the original array images.

[0551] In this manner, comparisons were made between normoxia and hypoxia in resting macrophages. The whole procedure was then repeated for activated macrophages, to investigate possible differences in the response to hypoxia. It is possible that potential differences for certain genes could be correlated with changes in expression resulting from activation, prior to challenge with hypoxia. To explore this possibility, comparisons were made between resting and activated macrophages, both in normoxia. Since some of the genes we have identified as being activated by hypoxia have very low hybridization signals in normoxia (for both resting and activated macrophages), this comparison was not possible.

[0552] We have found various patterns of gene expression changes occurring in response to hypoxia, related to the activation state of macrophages, which are presented below. Such a range of responses, specific to various subsets of genes, was not expected, and contradicts a view that the hypoxia response is a largely a generic mechanism.

[0553] Table 7 shows genes that are induced by hypoxia to a similar degree in resting and activated macrophages.

[0554] Table 8 shows genes that are induced by hypoxia to a greater degree in resting macrophages, as compared to activated macrophages. These data are presented illustratively in FIG. 5.

[0555] Data from Table 8/FIG. 5 reveals several unexpected observations.

[0556] A) From the final column it can be seen that macrophage activation in the absence of hypoxia, causes induction of many of these genes. This suggests that the signalling pathways resulting from activation and hypoxia might converge to a single transcriptional regulator, causing macrophage activation to pre-empt the response to subsequent hypoxia. This is exemplified most strikingly for Interleukin 8, which is dramatically induced in response to macrophage activation, but shows no additional response to hypoxia.

[0557] B) Genes in rows 11, 13 and 14 have no response to hypoxia following macrophage activation, though there is not a preceding large increase in expression in response to macrophage activation alone. This suggests that in the activated macrophage, the necessary signalling pathway or transcriptional regulator is not functional.

[0558] C) Although Table 8 was produced electronically, without selecting genes based on their names, it can be seen that genes encoding proteins of the metallothionein family feature strongly.

[0559] Table 9 shows genes which are induced by hypoxia to a greater degree in activated macrophages, compared to resting macrophages. These data are presented illustratively in FIG. 6.

[0560] In Table 7, there are several genes for which hypoxia/normoxia ratios were only obtained for activated macrophages, such as Cox-2 (see row 47). For these genes, macrophage activation usually increases expression of the gene to detectable levels, thus allowing the study of subsequent changes in response to hypoxia. It is likely that these genes are not significantly expressed in resting macrophages irrespective of hypoxia, and therefore the hypoxia response is probably specific to activated macrophages.

[0561] Certain genes respond to hypoxia by decreasing mRNA expression (repression), and these genes therefore have hypoxia/normoxia ratios of <1.0. This phenomenon is known in the field of hypoxia, although the mechanism is obscure. Data is presented in tables 7-9, which unexpectedly shows that this hypoxia-induced repression for specific genes is not a generic process, but is dependent on the cellular context. In Table 10/FIG. 7, genes are presented that are hypoxia-repressed to a greater degree in activated (column 7) compared with resting (column 8) macrophages. Prior to any hypoxic challenge, these gene are induced to varying degrees, in response to macrophage activation (column 9), suggesting a shared mechanism for these separate responses. From Table 10, genes in rows 1-6 show that macrophage activation is necessary to obtain any response to hypoxia. In resting macrophages, these genes are not responsive to hypoxia at all.

[0562] Strikingly, Table 10/FIG. 7 shows that seven separate genes encoding chemokine proteins (Monocyte chemotactic protein 1, Macrophage inflammatory protein 1b, Monocyte chemotactic protein 3 and Small inducible cytokine A3, Monocyte chemotactic protein 2, Macrophage inflammatory protein 2a and Macrophage inflammatory protein 2 precursor) are more strongly repressed in activated macrophages as compared to resting macrophages. These genes are also among the most inducible in response to activation alone, in normoxia (column 9). These findings are of potential utility in view of the great significance of chemokines to inflammatory disease. For example, macrophage chemotactic factor 1 (Table 10, row 19) is key to the pathological role of the macrophage in atherosclerosis (“Chemokines and atherosclerosis” Reape T J and Groot P H E, Atherosclerosis 147: 213-225, 1999).

[0563] Genes in rows 20-30 of Table 10, were not detectably expressed in resting macrophages, irrespective of hypoxia. Table 11 shows other genes that were down-regulated in response to hypoxia in macrophages.

### Example 3

[0564] Tissue-specific Hypoxia Regulation of Gene Expression by an Analysis of a Series of Primary Human Cell Cultures.

[0565] Equivalent cultures of non-immortalized, non-transformed primary human cells of 10 distinct types, were cultured in either normoxia or were exposed to hypoxia for 6 hr and 18 hr, and gene expression changes were determined. To the inventors' knowledge, this is the first time that such a study has been reported. Moreover, unlike the vast majority of information in the public domain relating to genes responsive to hypoxia, all of these cells were human and were cultured without any modifications following isolation from the human donors. By using primary cells rather than cell lines or immortalized cultures, the findings of this work more accurately represents the situation in the human body.

[0566] Most cell types were obtained from Clonetics (distributed by BioWhittaker, Walkersville, Md.) and cultured according to the manufacturer's recommendations, unless where otherwise shown. #1:adipocyte (Clonetics CC-2568; derived from subcutaneous adult adipose tissue), #2:cardiomyocyte (Clonetics CC-2582; derived from fetal tissue; prior to experimentation cultured in minimal medium: DMEM, 4% Horse serum), #3:endothelial (TCS CellWorks ZHC-2101 human umbilical vein endothelial cells), #4:fibroblast (Clonetics CC-2511 dermal fibroblasts derived from adult tissue), #5:hepatocyte (Clonetics CC-2591, derived from adult tissue), #6:macrophage (derived from human blood as described elsewhere in the specification), #7:mammary epithelial (Clonetics CC-2551; derived from adult tissue), #8:monocyte (derived from human blood as described elsewhere in the specification but without the 7 day differentiation culture period), #9:neuroblastoma (neuroblastoma-derived cell line SH-SY5Y), #10:renal epithelial (Clonetics CC-2556; derived from fetal tissue), #11:skeletal muscle myocyte (Clonetics CC-2561; derived from adult tissue). A non-primary cell type (#9) was used to represent neurons, since primary human neurons are difficult to source. Therefore a total of 11 cell types are compared. It should be noted that RNA from hepatocytes at the 16 hr timepoint of hypoxia was not available for this work.

[0567] Genes which were induced or repressed preferentially in particular cell type(s) were identified by hybridization of the RNA samples to the custom gene array, as described in Examples 1b and 1c. Each RNA sample was hybridised to duplicate or triplicate arrays, to ensure reproducible data, and was analysed using GeneSpring software. Data from replicate arrays were merged during analysis to generate mean values. Data normalisation was achieved per-array using the aforementioned list of control genes, such that differences in RNA labelling or hybridization due to experimental variation were corrected by referencing each gene to the mean value of the reference genes on the same array. Also, for each gene, expression values were obtained which represent the value in each experimental condition (e.g. macrophages 6 hr hypoxia) as compared to the median of value of that gene throughout the full range of experimental conditions (i.e. from all cell types). This transformation does not alter the relative values of any gene between the different experimental conditions, and is done since these is no obvious single reference experimental condition to create ratio values. This is common in microarray data analysis.

[0568] Table 12 shows the full dataset of this analysis. From this it can be seen that certain genes respond to hypoxia differently, depending on the particular cell type. This information is valuable in identifying biological targets for the development of therapeutic and diagnostic products. Not only does it indicate a particularly significant role for these genes in the specific cell type implicated in a disease, but it also identifies that any therapeutic product is less likely to produce problematic toxicological effects. Data shown in Table 12 and the derived figures, are reproducible, and are an accurate determination of mRNA expression levels. This may be confirmed by independent means, such as quantitative real time RT-PCR.

[0569] Certain genes from Table 12 will be presented for illustration.

[0570] Genes with a Greater Response in Monocytes or Macrophages

[0571] Since monocytes and macrophages are similar cell types, the latter derived from the former, they will be analysed together.

[0572] Expression profiles of 11 genes showing hypoxia-induced changes in gene expression which are most pronounced in monocytes or macrophages are shown in FIGS. 8-18. These genes correspond to:

| | |
|---|---|
| SEQ ID | CYP1 (cytochrome P450, subfamily XXVIIB) |
| NO::339/340 | |
| SEQ ID | interleukin 1 receptor antagonist |
| NO::357/358 | |
| SEQ ID | Regulator of G-protein signalling 1 |
| NO::375/376 | |
| SEQ ID | GM2 ganglioside activator protein |
| NO::389/390 | |
| SEQ ID | Alpha-2-macroglobulin |
| NO::405/406 | |
| SEQ ID | Ecotropic viral integration site 2A= |
| NO::475/476 | |
| SEQ ID | high affinity immunoglobulin epsilon receptor beta |
| NO::433/434 | (CFFM4) |
| SEQ ID | Pleckstrin |
| NO::431/432 | |
| SEQ ID | cytokine effector of inflammatory response SCYA3L |
| NO::469/470 | |
| SEQ ID | Novel PI-3-kinase adapter |
| NO::79/80 | |
| SEQ ID | hypothetical protein PRO0823 |
| NO::21/22 | |

[0573] It will be appreciated that the majority of these genes have a known biological function in immunity/inflammation, consistent with the known function of the monocyte/macrophage. Further to this knowledge, this data identifies that in hypoxic disease sites where monocyte/macrophages make up a significant proportion of the cell types, such as in rheumatoid arthritis synovial membranes, that these genes are possible therapeutic targets.

[0574] Ecotropic Viral Integration Site 2A (SEQ ID NO::475/476)

[0575] For example, the gene illustrated in FIG. 8, Ecotropic viral integration site 2A (SEQ ID NO::475/476) is induced in hypoxic monocytes to a level over 25 times higher than the median expression level of this gene throughout the other cell types. This gene, of unknown function, is located on Chromosome 17q11.2 close to genes with immune functions. Presented elsewhere in this specification is data showing that expression of Ecotropic viral integration site 2A is downregulated in response to the inflammatory cytokine interferon gamma. These novel data provide evidence that Ecotropic viral integration site 2A is a novel target for inflammatory conditions involving hypoxia and monocytes.

[0576] Novel PI-3-kinase Adapter SEQ ID NO::79/80 Clone p1E9 (EST Accession R62339).

[0577] Another example, in FIG. 9a, is SEQ ID NO::79/80 (EST accession R62339). It is seen that in hypoxic macrophages, this gene is expressed at 6-fold higher levels than the median expression level of this gene throughout the other cell types. Therefore, the levels of the encoded protein in hypoxic monocytes/macrophages, as found at various disease sites, are likely to be higher than in other cell types not involved in the disease process or present at the site of disease. This illuminates a novel utility of this gene as a target for the development of therapeutic products for diseases involving monocytes/macrophages and hypoxia.

[0578] The data that led to the generation of this Figure are as follows:

| | | Normalized expression |
|---|---|---|
| Cell type | Oxygen | (clone p1E9/SeqID: 79/80) |
| adipocyte | normoxia | 1.54 |
| adipocyte | hypoxia 6 hr | 0.89 |
| adipocyte | hypoxia 18 hr | 1.48 |
| cardiomyocyte | normoxia | 1.18 |
| cardiomyocyte | hypoxia 6 hr | 1.80 |
| cardiomyocyte | hypoxia 18 hr | 1.53 |
| endothelial | normoxia | 0.68 |
| endothelial | hypoxia 6 hr | 0.82 |
| endothelial | hypoxia 18 hr | 0.60 |
| fibroblast | normoxia | 0.60 |
| fibroblast | hypoxia 6 hr | 0.64 |
| fibroblast | hypoxia 18 hr | 0.73 |
| hepatocyte | normoxia | 0.92 |
| hepatocyte | hypoxia 6 hr | 1.62 |
| macrophage | normoxia | 4.20 |
| macrophage | hypoxia 6 hr | 3.97 |
| macrophage | hypoxia 18 hr | 6.19 |
| mammary epithelial | normoxia | 0.25 |
| mammary epithelial | hypoxia 6 hr | 0.42 |
| mammary epithelial | hypoxia 18 hr | 0.18 |
| monocyte | normoxia | 2.33 |
| monocyte | hypoxia 6 hr | 3.63 |
| monocyte | hypoxia 18 hr | 5.01 |
| neuroblastoma | normoxia | 0.93 |
| neuroblastoma | hypoxia 6 hr | 0.80 |
| neuroblastoma | hypoxia 18 hr | 0.85 |
| renal epithelial | normoxia | 0.57 |
| renal epithelial | hypoxia 6 hr | 0.61 |
| renal epithelial | hypoxia 18 hr | 0.61 |
| skeletal myocyte | normoxia | 1.58 |
| skeletal myocyte | hypoxia 6 hr | 1.37 |
| skeletal myocyte | hypoxia 18 hr | 1.17 |

[0579] To substantiate the array-based data, the same RNA samples were examined by real time quantitative RT-PCR. The advantages of this method are that it is more sensitive and because two gene-specific primers are used, the data will be more specific to the gene in question.

[0580] RNA from the above samples (except for the hepatocyte RNA which was unavailable) was Dnase I-treated prior to reverse transcription to remove possible contaminating genomic DNA and was reverse transcribed using an oligo dT ₍₁₅₎ primer and Superscript II reverse transcriptase. These samples were used as template for PCR reactions using primers specific to EST accession R62339 or to beta-actin. Primer sequences were as follows:

[0581] Novel PI-3-kinase adapter SEQ ID NO::79/80 Clone p1E9 (EST accession R62339).

Forward Primer
5′ GCC CTT AGT TTT TCA CTT CTT CGT 3′
Reverse Primer
5′ CGT TAA GAT CCA TTC TCA TTG CTG AT 3′
Beta Actin
Forward Primer
5′ GCC CTG AGG CAC TCT TCC A 3
Reverse Primer
5′ GCG GAT GTC CAC GTC ACA 3′

[0582] All RT-PCR reactions were performed using an ABI Prism 7700 Sequence Detector system. For each Q-PCR run, a master mix was prepared with 2×SYBR Green I master mix (Applied Biosystems) and primers at 5 μM. Two microlitres of respective diluted cDNA were added to PCR master mixture, amounting to 25 μL. The thermal cycling conditions comprised 50° C. for 2 minutes, 95° C. for 10 minutes, 40 cycles at 95° C. for 15 seconds, and 60° C. for 1 minute. PCR reactions were set up in 96 well format with duplicate amplifications for each data point including 8 serial cDNA dilutions (0.2, 0.1, 0.05, 0.025, 0.01, 0.005, 0.001 and 0.0001) of macrophage treated with 18 hours hypoxia to compose a standard curve, a no template control, no amplification control lacking reverse transcriptase, and each cDNA sample at a dilution value of 0.1. The experiment for the novel PI3K adapter was carried out in triplicate for reproducibility which were later determined by linear regression analysis. Data was analysed with necessary adjustment of the default baseline and threshold line using ABI Prism 7700 software. The Cₜ value, an important raw data for each sample, was calculated as the cycle number at which the ΔRₙ crosses the baseline. For each run, a standard curve was constructed by plotting a graph with mean Cₜ values from 8 data points from standard sample against log input of the corresponding dilution values with a best fit trend line. From the trend line, the formula ‘y=mx+c’ was created according to the y-intercept and slope of standard curve which then were used for calculating the log input amount of the experimental cDNA samples, as related to the calibration sample. Data for the Novel PI-3-kinase adapter was normalized to that of beta-actin to correct for potential differences in efficiency of cDNA synthesis between the RNA samples.

[0583] From the TaqMan data the specificity to monocytes and macrophage found from the array data is confirmed and found to be even more pronounced (see FIG. 9b). The data presented in the Figure are listed below. In the data listed below, the normalized expression values are multiplied by 1000 for clarity.

| | | Normalized expression |
|---|---|---|
| Cell type | Oxygen | (clone p1E9/SeqID: 79/80) |
| adipocyte | normoxia | 0.050 |
| adipocyte | hypoxia 6 hr | 0.007 |
| adipocyte | hypoxia 18 hr | 0.015 |
| cardiomyocyte | normoxia | 0.163 |
| cardiomyocyte | hypoxia 6 hr | 0.037 |
| cardiomyocyte | hypoxia 18 hr | 0.222 |
| endothelial | normoxia | 3.093 |
| endothelial | hypoxia 6 hr | 0.059 |
| fibroblast | normoxia | 0.527 |
| fibroblast | hypoxia 6 hr | 0.043 |
| fibroblast | hypoxia 18 hr | 0.037 |
| macrophage | normoxia | 404.593 |
| macrophage | hypoxia 6 hr | 503.026 |
| macrophage | hypoxia 18 hr | 1162.056 |
| mammary epithelial | normoxia | 0.026 |
| mammary epithelial | hypoxia 6 hr | 0.068 |
| mammary epithelial | hypoxia 18 hr | 0.112 |
| monocyte | normoxia | 565.471 |
| monocyte | hypoxia 6 hr | 657.465 |
| monocyte | hypoxia 18 hr | 979.048 |
| neuroblastoma | normoxia | 8.482 |
| neuroblastoma | hypoxia 6 hr | 7.104 |
| neuroblastoma | hypoxia 18 hr | 4.707 |
| renal epithelial | normoxia | 17.898 |
| renal epithelial | hypoxia 6 hr | 9.831 |
| renal epithelial | hypoxia 18 hr | 10.929 |
| skeletal myocyte | normoxia | 0.930 |
| skeletal myocyte | hypoxia 6 hr | 0.638 |
| skeletal myocyte | hypoxia 18 hr | 1.627 |

[0584] There are several technical reasons why the results from the array-based data might be more pronounced in the Taqman results—the lower sensitivity of the array-based method means that genes which are not expressed will be detected as a background signal. Also the array method is more likely to suffer from cross-hybridization between similar genes.

[0585] The TaqMan data illustrates dramatically the concept that the hypoxia response is not just a generic response found in all cell types, relating to generic cell processes such as metabolism.

[0586] Database searches for gene sequences showing identity with IMAGE clone acc:R62339 reveal that there are no matching human sequences of any type other than ESTs. This includes full length cDNAs, truncated cDNAs, gene sequences from chromosomal data or hypothetical protein gene sequences. Therefore the human gene represented by IMAGE clone acc:R62339 is a novel human gene.

[0587] Although this human EST is unannotated, by comparison with mouse sequence data (acc AF293806), it appears likely to encode a novel human Phosphoinositol 3-kinase (PI3-kinase) adapter molecule, homologous to the recently described mouse gene, BCAP. The human gene is neither present on GenBank or published elsewhere. The probable mouse equivalent of this gene has been published and is a known gene sequence named originally by Okada and colleagues as “BCAP” (Okada T, Maeda A, Iwamatsu A, Gotoh K, Kurosaki T. “BCAP: the tyrosine kinase substrate that connects B cell receptor to phosphoinositide 3-kinase activation”. Immunity. December 2000;13(6):817-27) (GenBank accession: NM_{—}031376). Briefly this and subsequent papers by the same authors indicate that BCAP is only relevant in B-cells.

[0588] Protein components of the Phosphoinositol 3-kinase (PI3-kinase) signalling cascade, involved in intracellular signalling, have been implicated clearly as potential drug targets (see Stein R C et al, “PI3-kinase inhibition: a target for drug development” Mol Med Today. September 2000;6(9):347-57). P13-kinases are a ubiquitously expressed enzyme family and, through the generation of phospholipid second messengers, are key to many cellular processes relevant to human disease, including proliferation, apoptosis and inflammation, motility, carbohydrate metabolism and intracellular protein sorting. These molecules are activated by receptor tyrosine kinases, src-like tyrosine kinases and viral oncoproteins. Studies of mutants that abrogate the binding of P13-kinases to these molecules has indicated that P13-kinases mediate mitogenic and cell motility responses of cells to growth factors and oncoproteins. As knowledge of their involvement in disease processes increases, the PI3-kinases and other components of the P13-kinase signalling cascade appear to be an increasingly attractive target for drug development, particularly in the fields of cancer and other proliferative diseases, and in the treatment of inflammatory and immunological conditions. Evidence of the functional specialization of PI3-kinase isoforms suggests that selective inhibition with acceptable toxicity might be possible. Furthermore, there is evidence from mouse studies that functional ablation of BCAP is likely to have clinically significant effect on inflammatory disease (Yamazaki et al 2002, J Exp Med 195(5):535-45).

[0589] The data presented for the gene encoded by SEQ ID NO::79/80 thus provides evidence that the encoded protein is a novel drug target in humans, specifically targeting monocyte/macrophages at hypoxic disease sites.

[0590] In the publication relating to murine BCAP, the protein is identified as an adapter molecule connecting the non-receptor protein tyrosine kinase Syk to the p85 subunit of P13-kinase, and therefore to the pivotal signalling pathways centred around P13-kinase (Okada T et al “BCAP: the tyrosine kinase substrate that connects B cell receptor to phosphoinositide 3-kinase activation.” Immunity. 2000 13:817-27). Although, in this report, Syk is acting as the intracellular signalling component of the B cell antigen receptor, which is present exclusively on B-cells, Syk has been shown to initiate intracellular signalling from other cell surface receptors which are expressed on macrophages, including the Fc gamma receptor, the chemokine receptor CCR5 and macrophage-expressed CD8 (Darby C et al “Stimulation of macrophage Fc gamma RIIIA activates the receptor-associated protein tyrosine kinase Syk and induces phosphorylation of multiple proteins including p95Vav and p62/GAP-associated protein”. J Immunol. 1994 152:5429-37) (Kedzierska K et al “FcgammaR-mediated phagocytosis by human macrophages involves Hck, Syk, and Pyk2 and is augmented by GM-CSF.” J Leukoc Biol. August 2001;70(2):322-8.), (Ganju R K et al “Beta-chemokine receptor CCR5 signals through SHP1, SHP2, and Syk.” J Biol Chem. 2000 275:17263-8.), (Lin T J et al “Activation of macrophage CD8: pharmacological studies of TNF and IL-1 beta production.” J Immunol. 2000 164:1783-92.).

[0591] Indeed, syk has been validated as target in macrophages to inhibit inflammatory activities of this cell type (Stenton G R et al “Aerosolized Syk antisense suppresses Syk expression, mediator release from macrophages, and pulmonary inflammation.” J Immunol. Apr. 1, 2000;164(7):3790-7.).

[0592] By screening a cDNA library derived from human peripheral blood mononuclear cells, two cDNA clones corresponding to BCAP have been obtained [clone GLB_{—}3 and clone GLB_{—}4]. Rapid Amplification of cDNA Ends (RACE) has also been performed to extend these sequences.

[0593] A detailed analysis of this data has been performed, and compared to the recent prediction of the human BCAP gene made by the human genome Ensembl project (www.ensembl.org/) (Ensembl predicted transcript accession ENST00000286061). The Ensembl gene prediction is equivalent in structure to the mouse sequence (NM_{—}031376), though it is truncated at the 5′ end compared to the mouse sequence.

[0594] Analysis of the sequence data indicates that the human BCAP gene is composed of 19 exons, 3 of which have no matching ESTs in GenBank and are not predicted by Ensembl (exons 1,3 and 6). Furthermore we show that alternative splicing leads to alternative isoforms which encode discrete polypeptide sequences.

[0595] The isoform of human BCAP mRNA which is equivalent to ENST00000286061 and mouse BCAP, we now call Hu.BCAP-A (encoding 805aa) and have experimentally determined its full and accurate sequence. Based on the exon structure and nomenclature, Hu.BCAP-A is comprised of a combination of exons 1 [SEQ ID NO:490], 2 [SEQ ID NO:492], 3, [SEQ ID NO:494], 4 [SEQ ID NO:496], 5 [SEQ ID NO:498], 6 [SEQ ID NO:500], 7 [SEQ ID NO:502], 8 [SEQ ID NO:504], 9 [SEQ ID NO:506], 10 [SEQ ID NO:508], 11 [SEQ ID NO:510], 12 [SEQ ID NO:512], 13 [SEQ ID NO:514], 14 [SEQ ID NO:516], 15 [SEQ ID NO:518], 16 [SEQ ID NO:520], 17 [SEQ ID NO:522], 18 [SEQ ID NO:524] and 19 [SEQ ID NO:526]. The full Hu.BCAP-A nucleotide sequence is presented in SEQ ID NO:528. The human gene has clear utility in the design of therapeutics for the treatment of human disease. The fuill Hu.BCAP-A polypeptide sequence is presented in SEQ ID NO:527.

[0596] Our cDNA sequencing work indicated that an alternative transcript which we now call BCAP-B is formed by the splicing pattern of exons: 6, 7, 8, 9, 10, 11, 12, 13, 14, 15, 16, 17, 18, 19. This encodes a protein of 540aa which is a truncated version of BCAP-A (SEQ ID NO: 529, encoded by SEQ ID NO:530). This truncation in the encoded protein is not due to inadequate sequencing, but reflects a different exon usage. Novel functions and utilities are expected for BCAP-B, compared to BCAP-A and mouse BCAP.

[0597] Our cDNA sequencing work indicated that a further alternative transcript which we now call BCAP-C is formed by the splicing pattern of exons: 1, 2, 3, 4, 7, 8, 9, 10, 11, 12, 13, 14, 15, 16, 17, 18, 19. This encodes a228aa polypeptide which as well as being shorter than BCAP-A also contains novel amino acid sequence derived from the novel exon 3 (SEQ ID NO:531, encoded by SEQ ID NO:532). Furthermore, as a result of exon 4 being directly spliced to exon 7 (rather than to exon 5 as found in BCAP-A) a frameshift is introduced and a small tail of 8 residues is created prior to reaching the first stop codon of this new frame. Again BCAP-C is expected to have novel functions and utilities.

[0598] Additional to the finding that the probable human orthologue of the adapter molecule BCAP is preferentially hypoxia-induced in human monocytes/macrophages, we also find from data generated by the custom array, that the protein acting immediately upstream of BCAP (i.e. Syk) is also regulated by hypoxia in this novel cell type specific manner, greatly increasing the biological significance of the original finding (see FIG. 9c). The data used to generate this Figure are presented below for clarity.

| | | Normalized expression |
|---|---|---|
| Cell type | Oxygen | (of syk) |
| adipocyte | normoxia | 2.6573591 |
| adipocyte | hypoxia 6 hr | 1.499927 |
| adipocyte | hypoxia 18 hr | 1.1115488 |
| cardiomyocyte | normoxia | 0.8357341 |
| cardiomyocyte | hypoxia 6 hr | 2.161058 |
| cardiomyocyte | hypoxia 18 hr | 0.90880114 |
| endothelial | normoxia | 0.60265505 |
| endothelial | hypoxia 6 hr | 0.56874704 |
| endothelial | hypoxia 18 hr | 0.43321633 |
| fibroblast | normoxia | 0.8542026 |
| fibroblast | hypoxia 6 hr | 0.7657573 |
| fibroblast | hypoxia 18 hr | 0.784982 |
| hepatocyte | normoxia | 0.5238476 |
| hepatocyte | hypoxia 6 hr | 0.8465495 |
| macrophage | normoxia | 4.272981 |
| macrophage | hypoxia 6 hr | 6.144931 |
| macrophage | hypoxia 18 hr | 10.278416 |
| mammary epithelial | normoxia | 1.1023632 |
| mammary epithelial | hypoxia 6 hr | 2.7382789 |
| mammary epithelial | hypoxia 18 hr | 0.7985004 |
| monocyte | normoxia | 6.052118 |
| monocyte | hypoxia 6 hr | 8.6809225 |
| monocyte | hypoxia 18 hr | 11.58468 |
| neuroblastoma | normoxia | 1.0230793 |
| neuroblastoma | hypoxia 6 hr | 1.089154 |
| neuroblastoma | hypoxia 18 hr | 0.7689335 |
| renal epithelial | normoxia | 0.88565326 |
| renal epithelial | hypoxia 6 hr | 1.2609364 |
| renal epithelial | hypoxia 18 hr | 0.6242461 |
| skeletal myocyte | normoxia | 1.3959162 |
| skeletal myocyte | hypoxia 6 hr | 0.91255134 |
| skeletal myocyte | hypoxia 18 hr | 0.64795935 |

[0599] In summary, we have shown here that a novel human gene encoding a predicted signalling protein relevant to human disease is activated by hypoxia, specifically in monocytes and macrophages. This data is validated by non-array based means. Furthermore, we identify the protein immediately upstream of this signalling system as being co-regulated in this manner too. Therefore the human PI3-kinase adapter encoded by IMAGE clone acc: R62339 and the non-receptor tyrosine kinase Syk are both identified here for the first time as therapeutic targets for diseases involving hypoxic macrophages, including Rheumatoid arthritis, chronic occlusive pulmonary disease, atherosclerosis and cancer. Because both genes are preferentially expressed in hypoxic macrophages, toxicity effects of therapeutic products directed at the encoded proteins are likely to be limited.

[0600] As discussed in detail above, fragments and functional equivalents of the PI-3-kinase adapter protein represented in SEQ ID NO::79/80 and other equivalent proteins are included within the present invention, in addition to ligands that bind specifically to these proteins. Furthermore, the invention also embraces purified and isolated nucleic acid molecules encoding these proteins, fragments and functional equivalents, vectors containing such nucleic acid molecules and host cells transformed with these vectors.

[0601] Regulator of G-protein Signalling 1 (SEQ ID NO::375/376)

[0602] Another intracellular signalling protein, Regulator of G-protein signalling 1 (RGS1; SEQ ID NO::375/376), in shown in FIG. 10. Here the expression levels in the hypoxic monocyte is 30-fold higher than the median expression level of this gene throughout the other cell types. The function of this protein is to negatively regulate G protein signalling pathways, and inhibit chemokine-induced cell migration of immune cells (Moratz C et al J Immunol. 2000 164:1829-38 and Denecke B et al J Biol Chem. 1999 274:26860-8.).

[0603] Our data suggests that this gene is preferentially expressed in macrophages, consistent with the findings of Denecke B et al (J Biol Chem. 1999 274:26860-8.). Our novel finding that expression is even further enhanced by hypoxia illuminates a mechanism by which cell migration is inhibited in hypoxia, leading to an accumulation of these cells at pathological sites of hypoxia. This mechanism is novel and distinct to other mechanisms proposed in the art to explain this key aspect of hypoxia and inflammation (for example: Grimshaw M J et al “Inhibition of monocyte and macrophage chemotaxis by hypoxia and inflammation—a potential mechanism.” Eur J Immunol. 2001 31:480-9).

[0604] Furthermore, FIG. 10 shows that Regulator of G-protein signalling 1 is upregulated during differentiation of monocytes to macrophages, with significance to changes in cell motility. This discovery therefore provides that inhibitors of RGS1 have utility in increasing the motility of macrophages that are used for cell-based therapies. Accordingly, one embodiment of this aspect of the invention provides for the use of an inhibitor of RGS1 in therapy, by increasing the motility of macrophage cells.

[0605] GM2 Ganglioside Activator Protein

[0606] The gene shown in FIG. 11, GM2 ganglioside activator protein, was originally characterized as a lysosomal co-factor required for degradation of gangliosides. It has been proposed to have alternative roles as a secreted protein, and can bind and inhibit the actions of the inflammatory mediator, platelet activating factor (Rigat B et al Biochem Biophys Res Commun. 1999 258:256-9.).

[0607] Our novel finding, presented in FIG. 11, shows that GM2 ganglioside activator protein is induced by hypoxia, preferentially in macrophages, suggesting an influence on the inflammatory functions of the macrophage in hypoxia.

[0608] In FIGS. 15-18, genes are shown which are expressed preferentially in the monocyte/macrophage, but which are decreased in expression in response to hypoxia. Being expressed at highest levels in the monocyte/macrophage, these genes are more likely to be significant to the biological functions of this cell type.

[0609] Interleukin 1 Receptor Antagonist (SEQ ID NO::357/358)

[0610] In FIG. 15, the gene interleukin 1 receptor antagonist (SEQ ID NO::357/358) is seen to be down-regulated by hypoxia in the macrophage. Since the function of the encoded protein is anti-inflammatory, then down-regulation of this gene would be expected to have a pro-inflammatory effect. Therefore, corrective expression of the gene, would be expected to produce therapeutic effects in inflammatory disorders involving macrophages and hypoxia, such as Rheumatoid Arthritis (Hollander A P et al. Arthritis Rheum. 2001 44:1540-4). This correlates with effects seen from the application the drug Anakrina/Kineret™ developed by Amgen. This supports the applicability of the genes disclosed herein as novel targets for therapeutic products.

[0611] The example of gene interleukin 1 receptor antagonist also provides good exemplification of the concept that different cell types respond to hypoxia differently. Here, not only are there quantitative differences, but also qualitative differences in that this gene is down-regulated by hypoxia in macrophages, but up-regulated by hypoxia in several other cell types, such as renal epithelial cells (see FIG. 15). Such findings are not documented in the art.

[0612] The dataset of Table 12 also contains genes which are induced preferentially in monocyte/macrophages and also in some but not all other cell types tested. Several of these genes are present as multiple clones on the gene array, giving separate data, therefore adding extra confidence to the conclusions. These genes, presented in FIGS. 19-28 correspond to:

[0613] SeqID:313/314 adipophilin

[0614] SeqID:163/164 hypothetical protein FLJ13511

[0615] SeqID:267/268 Osteopontin

[0616] SeqID:17/18 Hematopoietic Zinc finger protein

[0617] SeqID:137/138 CYP1B1

[0618] SeqID:325/326CYP1B1

[0619] It will also be seen that in the case of CYP1B1 (clones p1F16 and p1E3) the hypoxia response in monocytes/macrophages is qualitatively different to the other cell types tested, in that the gene is up-regulated rather than down-regulated in response to hypoxia.

[0620] Genes with a Greater Response in Endothelial Cells

[0621] The dataset of Table 12 also contains genes which are induced preferentially in endothelial cells, a cell type key to the process of angiogenesis, in response to hypoxia. These genes are as follows, and are presented in FIGS. 29-31:

[0622] SeqID:205/206 hypothetical protein FLJ22690

[0623] SeqID:65/66 cDNA DKFZp586E1624

[0624] SeqID:197/198 EST

[0625] Genes with a Greater Response in Hepatocytes

[0626] The dataset of Table 12 also contains genes which are induced preferentially in hepatocytes, in response to hypoxia. These genes are presented in FIGS. 32a and 33-38. It is noted that most of these genes, including hqp0376, encode proteins of the metallotheionein family. Furthermore, close inspection of these data reveals that the fold induction in hypoxia compared to normoxia for monocyte/macrophages are very high, though the absolute levels of expression are below that of hepatocytes.

[0627] SeqID:85/86 EGL nine (C.elegans) homolog 3

[0628] SeqID:83/84 Novel Metallothionein

[0629] SeqID:337/338 hypothetical protein hqp0376 (a metallotheionein)

[0630] SeqID:265/266 Metallothionein 2A

[0631] SeqID:243/244 Metallothionein 1G

[0632] SeqID:141/142 Hepcidin antimicrobial peptide

[0633] SeqID:239/240Metallothionein 1H

[0634] EGL Nine (C.elegans) Homolog 3

[0635] As described above, it has been discovered that a polypeptide encoded by a gene identified from the EST recited in SEQ ID No 86, having the Protein accession number BAB15101 (encoded by Homo sapiens cDNA: FLJ21620 fis, clone COL07838 Nucleotide accession AK025273) is regulated by hypoxia. Other public domain sequences corresponding to this gene include Homo sapiens cDNA: FLJ23265 fis, clone COL06456 Nucleotide accession AK026918. Accordingly, when referring in the present specification to the EST recited in SEQ ID No 86, it is intended that these gene and protein sequences are also embraced. This gene was identified using Research Genetics Human GeneFilters arrays, which contain an EST corresponding to the gene (accession number R00332). The gene is now termed EGL nine (C.elegans) homolog 3.

[0636] There are no reports that describe the function of this human gene. However, a high degree of amino acid homology is observed between the protein encoded by this gene, and a rat protein called “Growth factor responsive smooth muscle protein” or “SM20” (Nucleotide accession U06713; Protein accession A53770). An alignment of single letter amino acid sequences shown below. Over the italicised region there is 97% amino acid similarity and 96% amino acid identity.

| | | |
|---|---|---|
| A53770 | (1) | MTLRSRRGFLSFLPGLRPPRRWLRISKRGPPTSHWASPALGGRTLHYSCR |
| BAB15101 | (1) | -------------------------------------------------- |
| | | 51 100 |
| A53770 | (51) | SQSGTPFSSEFQATFPAFAAKVARGPWLPQVVEPPARLSASPLCVRSGQA |
| BAB15101 | (1) | |
| | | 101 150 |
| A53770 | (101) | LGACTLGVPRLGSVSEMPLGHIMRLDLEKIALEYIVPCLHEVGFCYLDNF |
| BAB15101 | (1) | ----------------MPLCHIMRLDLEKIALEYIVPCLHEVGFCYLDNF |
| | | 151 200 |
| A53770 | (151) | LGEVVGDCVLERVKQLHYNGALRDGQLAGPRAGVSKRHLRQDQITWIGGN |
| BAB15101 | (35) | LGEVVGDCVLERVKQLHCTGALRDGQLAGPRAGVSKRHLRGDQITWIGGN |
| | | 201 250 |
| A53770 | (201) | EEGCEAINFLLSLIDRLVLYCGSRLGKYYVKERSKAMVACYPGNGTGYVR |
| BAB15101 | (85) | EECCEAISFLLSLIDRLVLYCGSRLGKYYVKERSKAMVACYPCNCTGYVR |
| | | 251 300 |
| A53770 | (251) | HVDNPNGDGRCITCIYYLNKNWDAKLHGGVLRIFPEGKSFVADVEPIFDR |
| BAB15101 | (135) | HVDNPNGDGRCITCIYYLNKNWDAKLHGGILRIFPEGKSFIADVEPIFDR |
| | | 301 350 |
| A53770 | (301) | LLFFWSDRRNPHEVQPSYATRYAMTVWYFDAEERAEAKKKFRNLTRKTES |
| BAB15101 | (185) LLFFWSDRRNPHEVQPSYATRYAMTVWYFDAEERAEAKKKFRNLTRKTES | |
| | | 351 |
| A53770 | (351) | ALAKD |
| BAB15101 | (235) | ALTED |

[0637] The high degree of amino acid similarity suggests that the human protein BAB15101 has an equivalent biochemical function to the rat protein A53770 (“Growth factor responsive smooth muscle protein” or “SM20”). Recent publications have shown that SM20 functions to promote apoptosis in neurons (Lipscomb et al., J Neurochem 1999; 73(1):429-32; Lipscomb et al., J Biol Chem Nov. 1, 2000; [epub ahead of print]). Significantly, SM20 has been shown to be expressed at high levels in the heart (Wax et al., J Biol Chem 1994; 269(17): 13041-7).

[0638] It has also been discovered that a polypeptide encoded by a gene identified from the EST recited in SEQ ID No 90, having the Protein accession number CAB81622, is regulated by hypoxia. The encoding human gene has been annotated in the UniGene database as “Similar to rat smooth muscle protein SM-20”; the nucleotide sequence is contained within the nucleotide accession AL117352. More recently, a longer fragment of this gene has been cloned, named c1orf12, or EGLN1 (Nucleotide accession AAG34568; Protein accession AAG34568). Accordingly, when referring in the present specification to the EST recited in SEQ ID No 90, it is intended that these gene and protein sequences are also embraced.

[0639] This distinct human gene, encoding a protein related to SM20 and EGLN3 (BAB15101), is also induced in response to hypoxia. This gene was identified using Research Genetics Human GeneFilters arrays, which contain an EST corresponding to the gene (accession number H56028).

[0640] Independently to this, a fragment of this gene has been cloned from a cDNA library derived from hypoxic human cardiomyoblasts, and it has been shown that the gene is increased in expression in response to hypoxia in this cell type (see Table 1 herein; penultimate row). The nucleotide sequence of this cDNA fragment is referred to herein as SEQ ID No 90a.

[0641] In the light of this novel discovery reported herein that these human equivalents of SM20 are induced by hypoxia, it is herein proposed that in cardiac ischaemia, the resulting apoptosis is due at least in part, to increased expression of these genes. The therapeutic modulation of the activity of EGLN3 (BAB15101; SEQ ID NO: 85), the EGLN3 splice variant (SEQ ID NO: 85a), EGLN1 (c1orf12; AAG34568; SEQ ID NO: 89), CAB81622, SM20 and other equivalent proteins and encoding genes therefore provides a novel means for the treatment of myocardial ischaemia, through the alteration of the propensity of myocardial cells to undergo apoptosis. For example, a suitable treatment may involve altering the susceptibility of ischaemic myocardial tissue to subsequent reperfusion and re-oxygenation, or may involve modulating the susceptibility of chronic ischaemic myocardial tissue (including forms of angina) to later more severe ischaemia, which would result in myocardial infarction. It is submitted that, by way of analogy, cerebral ischaemia may be treated using the same principle.

[0642] Although the Applicant does not wish to be bound by this theory, the downstream effects of SM20 and related genes such as EGLN3 (BAB15101; SEQ ID NO: 85), the EGLN3 splice variant (SEQ ID NO: 85a), EGLN1 (c1orf12; AAG34568; SEQ ID NO: 89), CAB81622 and SM20, namely, apoptosis and angiogenesis might be explained as follows. The apoptotic effect of NGF withdrawal may be mediated by induction of the hypoxia pathway, but may be an aspect of the supposed involvement of the HIF protein in the stress response. HIF1α is induced by reactive oxygen species (see Richard et al. J Biol Chem Sep. 1, 2000;275(35):26765-71). This could, in turn, be mediated by over-load of the proteosomal pathway for HIF1α degradation and the consequent accumulation of undegraded HIF1α. Accordingly, it is considered that modulation of SM20 and the related genes EGLN3 (BAB15101; SEQ ID NO: 85), the EGLN3 splice variant (SEQ ID NO: 85a), EGLN1 (c1orf12; AAG34568; SEQ ID NO: 89) and CAB81622 may have applications in the treatment of diseases resulting from disturbances in proteosome function, such as prion diseases and other neuro-degenerative diseases.

[0643] These data provide the first connection between these related genes and the physiological response to hypoxia. Recently published research papers have identified that the protein products of these genes can act as proline hydroxylases (see Bruick R K et al Science. 2001 294:1337-40 and Epstein A C et al Cell. 107:43-54). This is consistent with our observations that certain proline hydroxylases are induced in response to hypoxia and the genes EGLN1 and EGLN3 are part of the hypoxia response. For example, two genes encoding proline hydroxylases have been identified herein as being increased in expression in response to hypoxia (proline 4-hydroxylase, alpha polypeptide 1; SeqID:231/232, proline 4-hydroxylase, alpha polypeptide II; SeqID:349/350). This identified a functional significance of proline hydroxylation as a response to hypoxia.

[0644] Proline hydroxylase leads to degradation of HIF1α in normoxia (HIF regulates its own degradation—feedback). Hydroxylated HIF1α+VHL leads to ubquitination and consequent degradation of HIF1α by proteosome. The activity of the prolyl hydroxylase is 0₂-dependent, so under conditions of hypoxia, HIF1α is not hydroxylated efficiently and is stabilized. HIF1α protein thus accumulates to a high level. The hypoxia-induction of the prolyl hydroxylase ensures that when 0₂ concentration returns to normal, there is sufficient enzyme available to target this high level of HIF1α efficiently for rapid degradation.

[0645] Degradation of HIF1α is dependent on HIF1-induced transcription (i.e. is hypoxia inducible). Berra et al (FEBS Lett Feb. 23, 2001;491(1-2):85-90) raises the specific hypothesis of an unknown hypoxia-inducible factor which targets HIF1a for proteosomal degradation. It appears reasonable to propose that this factor will clearly be hypoxia-inducible, to ensure that a rapid and effective constraint on the hypoxic response would operate on return to normoxia. It now appears as if the genes EGLN1, EGLN3 and the EGLN3 splice variant form part of this mechanism.

[0646] It is also hypothesised that SM20 and the related genes EGLN3 (BAB15101; SEQ ID NO: 85), the EGLN3 splice variant (SEQ ID NO: 85a), EGLN1 (c1orf12; AAG34568; SEQ ID NO: 89) and CAB81622 may act as tetramers. Known prolyl hydroxylases such as prolyl 4-hydroxylase (P4H) are known to act as tetramers of two alpha subunits and two beta subunits. SM20 and the related genes exhibits high similarity to the alpha subunit of P4H and it therefore seems likely that SM20 and the related genes are likely to have a binding partner that is equivalent to the beta subunit of P4H.

[0647] SM20 has been shown to bind to the transcription factor HIF1α, and shares a low level homology with a p53 binding protein. P53 is a transcription factor that is known to be involved in apoptosis. Accordingly, it is proposed that in addition to binding to HIF1A, SM20 and the related genes EGLN3 (BAB115101; SEQ ID NO: 85), the EGLN3 splice variant (SEQ ID NO: 85a), EGLN1 (c1orf12; AAG34568; SEQ ID NO: 89) and CAB81622 may also bind and modify other transcription factors that are involved in the hypoxic response such as EPAS and HIF3A, or other transcription factors such as p53 and thereby influencing apoptosis. This aspect of the invention thus provides dimer and tetrameric forms of the EGLN3 (BAB15101; SEQ ID NO: 85), the EGLN3 splice variant (SEQ ID NO: 85a), EGLN1 (c1orf12; AAG34568; SEQ ID NO: 89) and CAB81622 proteins, preferably complexed with a protein selected from the group consisting of HIF1α, p53 and a protein binding partner that is equivalent to the beta subunit of P4H. Preferably, such dimers and tetramers are heterodimers/heterotetramers.

[0648] To provide further evidence that these related genes are a significant part of the hypoxia response additional expression data is presented here.

[0649] Expression profiles for these two genes will be displayed with pre-chip normalisation to correct for differences in RNA labelling etc, but within each gene no further normalisation is done (per-gene normalisation), so the relative absolute expression levels of the two genes can be compared and Y-axis units between separate graphs from the same experiment are comparable. These graphs are presented as FIGS. 32b (c1orf12) and 32c (EGLN3).

[0650] It can be seen from these Figures that both genes (c1orf12 and EGLN3) are inducible in response to hypoxia in macrophages whether activated by gamma interferon and lipopolysaccharide or if de-activated by treatment with interleukin-10. In macrophages the absolute expression level of C1orf12 appears to be higher than EGLN3.

[0651] There is a prejudice in the art that the response to hypoxia is generic to all cell types. Contrary to this, we show herein that genes are regulated by hypoxia to a greater degree in certain cell types, substantiating their utility in designing specific therapeutic products for diseases involving those cell types.

[0652] From FIGS. 32a and 32d and the data presented below, differing expression profiles of the two related genes c1ORF12 and EGLN3 are apparent throughout the 11 tested cell types, though C1orf12 is generally expressed at higher levels than EGLN3.

| | | mRNA | mRNA |
|---|---|---|---|
| | | expression | expression |
| | | (c1ORF12 | (EGLN3 |
| Cell type | Oxygen | SeqID: 89/90) | SeqID: 85/86) |
| adipocyte | normoxia | 0.0075 | 0.0033 |
| adipocyte | hypoxia 6 hr | 0.0091 | 0.0027 |
| adipocyte | hypoxia 18 hr | 0.0182 | 0.0025 |
| cardiomyocyte | normoxia | 0.0067 | 0.0019 |
| cardiomyocyte | hypoxia 6 hr | 0.0381 | 0.0023 |
| cardiomyocyte | hypoxia 18 hr | 0.0201 | 0.0026 |
| endothelial | normoxia | 0.0198 | 0.0019 |
| endothelial | hypoxia 6 hr | 0.0583 | 0.0033 |
| endothelial | hypoxia 18 hr | 0.0397 | 0.0026 |
| fibroblast | normoxia | 0.0119 | 0.0032 |
| fibroblast | hypoxia 6 hr | 0.0260 | 0.0046 |
| fibroblast | hypoxia 18 hr | 0.0235 | 0.0040 |
| hepatocyte | normoxia | 0.0075 | 0.0080 |
| hepatocyte | hypoxia 6 hr | 0.0074 | 0.0146 |
| macrophage | normoxia | 0.0033 | 0.0008 |
| macrophage | hypoxia 6 hr | 0.0083 | 0.0018 |
| macrophage | hypoxia 18 hr | 0.0058 | 0.0021 |
| mammary epithelial | normoxia | 0.0065 | 0.0014 |
| mammary epithelial | hypoxia 6 hr | 0.0137 | 0.0055 |
| mammary epithelial | hypoxia 18 hr | 0.0144 | 0.0065 |
| monocyte | normoxia | 0.0027 | 0.0006 |
| monocyte | hypoxia 6 hr | 0.0084 | 0.0014 |
| monocyte | hypoxia 18 hr | 0.0080 | 0.0016 |
| neuroblastoma | normoxia | 0.0344 | 0.0011 |
| neuroblastoma | hypoxia 6 hr | 0.1085 | 0.0013 |
| neuroblastoma | hypoxia 18 hr | 0.0551 | 0.0020 |
| renal epithelial | normoxia | 0.0275 | 0.0046 |
| renal epithelial | hypoxia 6 hr | 0.0560 | 0.0046 |
| renal epithelial | hypoxia 18 hr | 0.0395 | 0.0096 |
| skeletal myocyte | normoxia | 0.0088 | 0.0029 |
| skeletal myocyte | hypoxia 6 hr | 0.0277 | 0.0035 |
| skeletal myocyte | hypoxia 18 hr | 0.0245 | 0.0038 |

[0653] For instance, in the hypoxic hepatocyte (6 hr) the normalized expression values of EGLN and c1orf12 are 0.015 and 0.0074 respectively, i.e. EGLN being the dominant gene. In contrast, in the neuroblastoma cell line SH-SY5Y, the normalized expression values of EGLN and c1orf12 after 6 hr hypoxia are 0.0012 and 0.108 respectively, i.e. c1orf12 being the dominant gene by a large margin. This data demonstrates that c1ORF12 and EGLN3 are not constitutively expressed at an equal amount in different tissues indicating specificity of function. Therefore, it is considered that therapeutic products may be developed based on this data, with the goal of modulating proline hydroxylation of target proteins (such as HIF1alpha) in specific tissues, based on the differing expression profile of c1ORF12 and EGLN3 in those tissues.

[0654] In Example 1b herein, genes were identified from a custom array, which give a greater induction in macrophages (by a factor of at least 1.5) when hypoxia is augmented by over-expression of HIF1alpha or EPAS from an adenovirus. The data from the HIF/EPAS over-expression work is presented herein in Example 1c, but specifically relating to c1ORF12 and EGLN3 is summarised in FIGS. 32e and 32f. From this data it is apparent that EGLN3/FLJ21620 fis cl.COL07838 but not c1ORF12 is increased in expression by the transcription factor EPAS1, but not HIF1alpha. This is apparent by comparing experimental condition 9 (hypoxia with EPAS overexpression; expression value=3.48) to that of 5 (hypoxia without EPAS overexpression; expression value=1.65). This adds valuable information about the mechanism of regulation of the gene encoding EGLN3.

[0655] To confirm this data the RNA samples for experimental conditions 1,3,5,7,9 (corresponding to the high dose of adenovirus) were also measured using a different array-based methodology—the AffyMetrix GeneChip. The results of this experiment are presented in FIGS. 32g and 32h.

[0656] Functional Characterization of EGL nine (C.elegans) homolog 3 role in the induction of Cardiomyocyte apoptotic cell death

[0657] EGLN3 has been cloned into pONY8.1 and Smart2.IRES.GFP equine infectious anaemia virus (EIAV) vectors, and AdCMV.TRACK.GFP (AdenoQuest) adenoviral genome vectors (see co-owned co-pending International patent application PCT/GB01/00758). These vectors have been used in “gain-of-function” studies in which EGLN3 has been overexpressed in order to elucidate corresponding protein function. Human embryo kidney (HEK 293T) and dog osteosarcoma (D17) cell lines have been used in transient plasmid transfection experiments to confirm EGLN3 expression from viral vector genomes. Rat cardiomyocyte cell line (H9C2) and primary human neonatal cardiomyocytes (PHNC) (BioWhittaker, CC2582) have been used in viral transduction experiments to determine the biological activity of EGLN3. In all cell types, expression of EGLN3 has been followed by combinations of immunofluorescence, Western blotting and TaqMan quantitative PCR. Immunofluorescence and Western blotting employ an antibody specific for the FLAG epitope engineered into the 3′ terminus of EGL nine (C.elegans) homolog 3 (Sigmna, F3165). TaqMan quantitative PCR utilizes the SYBR Green method (Applied Biosystems).

[0658] Western blotting has confirmed the transient expression of EGLN3 from an EIAV genome construct in HEK 293T (expected size approx 717 bp, 26 Kda). Immunofluorescence has localized transient expression of EGL nine (C.elegans) homolog 3 from EIAV expression construct in HEK293T to the cytoplasm. Expression of EGL nine (C.elegans) homolog 3 is elevated after 4 hours exposure to hypoxic conditions (0.1% (v/v) oxygen), when compared to expression observed under normoxia (20% (v/v) oxygen) (see FIG. 32i). TaqMan primers have been designed and optimised for the initial measurement of EGL nine (C.elegans) homolog 3 expression in EIAV or Adenovirus transduced H9C2 and PHNC (Forward: TCATCGACAGGCTGGTCCTC; Reverse: GTTCCATTTCCCGGATAGAA). All findings at the RNA level are corroborated by immunofluorescence and Western blotting analyses at the protein level.

[0659] EIAV transduction of H9C2 and PHNC has been optimised with constructs containing green fluorescence protein (GFP) and LacZ reporter genes, using the VSVg envelope and a range of MOI between 10 and 100. GFP results were scored by fluorescence microscopy, while LacZ transductants were identified through the assay of β-galactosidase activity. An MOI of 50 transduced approximately 50% of the cell population.

[0660] EGLN3 is predicted to have pro-apoptotic activity in cardiomyocytes. Early, Mid and late phase apoptosis are characterized by translocation of membrane phospholipid phosphatidylserine (PS) from the inner face of the plasma membrane to the cell surface, activation of specific proteases (caspases) and fragmentation of DNA, respectively (Martin, S. J., et al., J. Exp. Med. 1995, 182, 1545-1556; Alnemri, E. S., et al., J. Cell. Biochem. 1997, 64, 33-42; Wylie, A. H., et al., Int. Rev. Cytol. 1980, 68, 251-306). Translocation of PS has been identified through use of ApoAlert kit (Clontech; K2025-1), which employs FITC-labelled antibodies to detect surface expression of the PS, Annexin V. Caspase activity has been followed using the homogeneous fluorimetric caspase assay (Roche; 3005372) which allows the quantification of caspase activity through the cleavage of a fluorescent substrate. DNA fragmentation has been estimated using the nuclear stain Hoescht 33345 (Sigma, B2261; and fluorescence microscopy to locate areas of chromatin condensation. Total viability of cell population has been quantified through measurement of the ability of mitochondrial reductase to metabolize the fluorescent substrate MTT (Sigma, M2128)(Levitz S. M & Diamond, R. D. J. Infect. Dis. November 1985; 152(5):938-45).

[0661] Conditions for early, mid and late stage apoptosis in H9C2 and PHNC have been defined using hypoxia and nutrient-depleted growth medium to mimic those ischaemic conditions found in vivo (Brar, B. K., et al., J. Biol. Chem. 2000, 275, 8508-8514). Transduction of PHNC with EIAV vectors containing EGLN3 is sufficient to cause an increase in caspase activity in cells cultured under normoxic conditions, confirming the role of EGLN3 in the induction of cardiomyocyte apoptosis. Using an MOI of 50, a 2-fold increase in caspase activity was seen in EGLN3 transduced cells, when compared to controls 48 hours,post transduction (see FIG. 32j).

[0662] Increased expression of EGL nine (C.elegans) homolog 3 in transduced cells is confirmed by TaqMan, immunofluorescence and Western blotting. Similar experiments are performed to determine whether EGL nine (C.elegans) homolog 3 expression further sensitises H9C2 and PHNC to previously defined ischaemic insults. Staurosporine (Calbiochem; 569397) and Smart2.IRES.GFP EIAV vectors containing the Bax gene will be applied as chemical and viral pro-apoptotic controls, respectively (Yue, T-L., et al., J. Mol. Cell. Cardiol. 1998, 30, 495-507; Reed, J. C. J Cell Biol. 1994, 124(1-2):1-6).

[0663] Gene silencing approaches may be undertaken to down-regulate endogenous expression of EGLN3 in PHNC to determine the degree of protection against apoptotic cell death provided by a reduction in EGLN3 activity. RNA interference (RNAi) (Elbashir, S M et al., Nature 2001, 411, 494-498) is one method of sequence specific post-transcriptional gene silencing that may be employed. Short dsRNA oligonucleotides are synthesised in vitro and introduced into a cell. The sequence specific binding of these dsRNA oligonucleotides triggers the degradation of target mRNA, reducing or ablating target protein expression. A Hammerhead ribozyme library, contained in EIAV expression vectors, may also be applied. Efficacy of both gene silencing approaches may be assessed initially through the measurement of EGLN3 expression, at the RNA level by TaqMan and at the protein level by Western blotting. Protection against previously described ischaemic insults provided by these methods of EGLN3 gene silencing may be assayed biologically as detailed above. Caspase inhibitors (caspase 3 inhibitor V, 2129002 and caspase inhibitor I, 627610, both Calbiochem) and Smart2.IRES.GFP EIAV vectors containing the Bc1-2 gene may be applied as chemical and viral anti-apoptotic controls, respectively (Kroemer, G. Nat Med. 1997, 3(6):614-20).

[0664] Similar “gain-of-function” and gene silencing approaches will be applied to the related gene, encoded by SEQ ID 90, named c1orf12.

[0665] PCR results for the EGLN3 splice variant (SEQ ID NO: 85a)

[0666] Initial work using RNase protection assays using a 32P-labelled riboprobe which spans the sequence of both isoforms validated the existence of the unexpected isoform (data not shown).

[0667] Qualitative RT-PCR was then used to estimate the relative abundance of the two splice forms of EGLN3 in a range of primary human cell types growing in normoxia and hypoxia, as described below. This method was also used to clone and sequence the splice isoform to demonstrate qualitative comparisons in the levels of the two isoforms.

[0668] This data gives further proof that the splice isoform actually exists, but moreover demonstrates that the relative expression levels of the two isoforms varies between cell types. It is therefore clear that cell type differential alternative splicing occurs for this gene. This may allow the design of more specific inhibitors to the different splice isoforms, which may have significant implications for the treatment and diagnosis of human disease. There are many examples of the significance of splicing to human disease, where the products of different splice forms having distinct biochemical and biological activity.

[0669] Primary human cell types were obtained from Clonetics (distributed by BioWhittaker, Walkersville, Md.) and cultured according to the manufacturer's recommendations, unless where otherwise shown.

[0670] RT-PCR was performed by reverse transcribing 2 ug total RNA with Superscript II reverse transcriptase (Invitrogen) in a 20 ul reaction. 1 ul of the resulting cDNA was used as template for PCR reactions using Clontech Advantage II polymerase. Primer nucleotide sequences were as follows:

[0671] Sense ctcgattctgcgggcgagatgc

[0672] Antisense gtcttcagtgagggcagattcag

[0673] PCR cycling was performed using an Applied Biosystems 9700, using the following “touchdown” cycling parameters:

[0674] (94° 1 min)×1

[0675] (94° 10 sec; 72° 2 min)×5

[0676] (94° 10 sec; 70° 20 sec; 72° 2 min)×5

[0677] (94° 10 sec; 68° 20 sec; 72° 2 min)×22

[0678] It should be noted that the combination of an accurate and processive reverse transcriptase enzyme (Superscript II) and highly stringent touchdown PCR cycling parameters as shown above, and a high fidelity hot-started enzyme (Advantage II polymerase) render these data highly specific and not liable to artefacts, as experienced with PCR amplifications performed under less stringent conditions.

[0679] Using these conditions, the expected ELGN3 PCR product of 735 bp is observed, though an additional band of 453 bp is also seen, representing the novel splice isoform described herein. This band was cut out, cloned and sequenced. The band has also been found in a variety of screened human cDNA libraries.

[0680] Evaluation of Potential HIF Prolyl Hydroxylase Inhibitors

[0681] As discussed above, the stability of HIF is controlled by proline hydroxylation, catalysed by the product of the EGLN3 gene which renders the HIF protein unstable. EGLN3 is only active in normoxia since the reaction that it catalyses requires oxygen. By this mechanism, in normoxia HIF is degraded and its target genes are not expressed (Epstein A C et al, Cell. 2001; 107(l):43-54). Analysis of the sequence of the novel splice isoform of EGLN3, contained in this specification, suggests that it retains an intact catalytic domain, and therefore should be active as a HIF proline hydroxylase. Here we have experimentally verified this.

[0682] Although endogenous HIF is unstable in normoxia, when it is overexpressed by experimental means, it is able to overcome the degradation mechanism and transcription of HIF target genes occurs. The commonly used human cell line 293T growing in conditions of normoxia was transiently transfected with a reporter plasmid (HRE-Luc), which provides a measure of HIF activity in units of Luciferase activity. This plasmid is described in Boast K et al Hum Gene Ther. 1999; 10(13):2197-208.

[0683] Plasmids and conditions used were as follows:

| Inhibitor | Plasmid1 | Plasmid2 | Plasmid3 |
|---|---|---|---|
| — | pCIneo | pCIneo | CMV-Luc |
| — | pCIneo | pCIneo | HRE-Luc |
| DAU (2.5 μM) | pCIneo | pCIneo | HRE-Luc |
| MIMO | pCIneo | pCIneo | HRE-Luc |
| | pCIneo | CMV-SVFL1 | HRE-Luc |
| MIMO | pCIneo | CMV-SVFL1 | HRE-Luc |
| — | CMV-HIF | PCIneo | HRE-Luc |
| — | CMV-HIF | CMV-SVFL1 | HRE-Luc |
| MIMO | CMV-HIF | CMV-SVFL1 | HRE-Luc |
| — | pCIneo | CMV-SVFL2 | HRE-Luc |
| MIMO | pCIneo | CMV-SVFL2 | HRE-Luc |
| — | CMV-HIF | CMV-SVFL2 | HRE-Luc |
| MIMO | CMV-HIF | CMV-SVFL2 | HRE-Luc |

[0684] MIMO=L-mimosine; 0.4 mM used. DAU=Daunorubicin; due to toxicity noted in a previous experiment, dosage of Daunorubicin used was 2.5 μM. Plasmid CMV-SVFL1 expresses full length EGLN3. Plasmid CMV-SVFL2 expresses the EGLN3 splice variant.

[0685] Three plasmid transfections were performed and pCIneo was used as the “stuffing”/control plasmid to fill the vacancies.

[0686] Transfected 293 cells were incubated under normoxia till the end of the experiment.

[0687] The results of this experiment are shown in FIG. 10. The collagen prolyl hydroxylase (PH) inhibitors EDB and MIMO were found to work as HIF-PH inhibitors under conditions of normoxia, even when the full length EGLN3 protein or EGLN3 splice variant was over-expressed.

[0688] It can be seen that when a plasmid containing HIF1α expressed from the CMV promoter was co-transfected with HRE-Luc, HIF1α activity was detected as 20953 Luciferase units. Accordingly, overexpressing HIF1α increased the luciferase activity (compare H and HM in FIG. 10). In a similar transfection, where a third plasmid containing full length EGLN3 (CMV-SVFL1) was also introduced, the units of luciferase produced were reduced to 918 (see col. S1HH in FIG. 10). This reflects the fact that EGLN3 targets HIF1a, including over-expressed HIF1α, for destruction leading to a decreased reading for HIF1α activity (measured here in Luciferase units). When this experiment was performed with the novel splice isoform of EGLN3 (CMV-SVFL2), as described herein, HIF1α was similarly inhibited to an even greater degree, with a Luciferase reading of 773 (see col S2HH in FIG. 10).

[0689] Over-expression of the full length EGLN3 protein or EGLN3 splice variant thus suppressed the effect of overexpression of HIF1α on luciferase. Both the full length EGLN3 protein and EGLN3 splice variant thus have been proven to possess biological activity. Overexpression of both these isoforms reduce HIF-mediated gene expression through HRE reporters, thus demonstrating their role in the HIF signalling pathway. The suppression effect of the EGLN3 splice variant appeared to be stronger than that of the full length EGLN3 protein.

[0690] Genes with a Greater Response in Renal Epithelial Cells

[0691] The dataset of Table 12 also contains genes which are induced preferentially in renal epithelial cells, in response to hypoxia. These genes are presented in FIGS. 39-44.

| | |
|---|---|
| SeqID: 117/118 | EST |
| SeqID: 129/130 | hypothetical protein FLJ22622 |
| SeqID: 31/32 | TRIP-Br2 |
| SeqID: 301/302 | Tumor protein D52 |
| SeqID: 91/92/92a | Semaphorin 4b |
| SeqID: 371/372 | Dec-1 |

[0692] For Semaphorin 4b (SeqID:91/92/92a), the clone presented in FIG. 43 is p1P14, corresponding to IMAGE clone acc BE910319, the sequence of which covers a large region of the gene including protein coding sequence, which may cross-hybridise to other members of the semaphorin family. A separate clone (p1D17) as found in the original filing, was derived from the subtracted library and corresponds to a more unique region of this gene in the untranslated region. From Table 12 it will be appreciated that a significant response is also found in the macrophage. This is validated by RNase protection assay data (see FIG. 57). Further clarification of this gene using complementary experimentation methods will resolve the exact cell-type specific nature of the expression of this gene, though it is clear from this data that it is induced in renal epithelial cells and macrophages.

[0693] Genes with a Greater Response in Mammary Epithelial Cells

[0694] The dataset of Table 12 also contains genes which are induced preferentially in mammary epithelial cells, in response to hypoxia. These genes are presented in FIGS. 45-52.

| | |
|---|---|
| SeqID: 447/448 | Calgranulin A |
| SeqID: 67/68 | ERO1 (S. cerevisiae)-like |
| SeqID: 25/26 | hypothetical protein FLJ20500 |
| SeqID: 229/230 | N-myc downstream regulated |
| SeqID: 387/388 | Decidual protein induced by progesterone |
| SeqID: 379/380 | Integrin, alpha 5 |
| SeqID: 225/226 | Tissue factor |
| SeqID: 237/238 | COX-2 |

[0695] In the case of Cox-2, which encodes a key drug target, it can be seen that in many cell types, especially the mammary epithelial cells, there is a clear induction in response to hypoxia. In contrast, for endothelial cells there is a very significant time-dependent decrease in Cox-2 gene expression in response to hypoxia. Similarly, for Calgranulin A, there is strong positive induction in hypoxic mammary epithelial cells, but in the macrophage, the response to hypoxia is negative. These clearly exemplify the unexpected finding that cell types respond to hypoxia differentially, both quantitatively but also qualitatively. This is not currently known.

[0696] Hypoxia Regulation of Novel Human Genes

[0697] From Table 12, it will be appreciated that several genes with no prior annotation in public domain gene sequence databases are now identified as being regulated by hypoxia, in at least one cell type. To make this clear, these genes have been copied from Table 12 and presented in Tables 13 and 14), showing the hypoxia/normoxia induction ratio of the cell type in which the response is most pronounced. These figures are derived by dividing the normalized expression value, as found in Table 5, in hypoxia by that in normoxia for the same cell type. In some cases, where hypoxia causes inhibition of gene expression, the fold change is prefixed by the term “DOWN”. The cell type and time point of maximal response to hypoxia are also noted in Tables 13 and 14. The main purpose of Tables 13 and 14 is to demonstrate that these genes have significant responses to hypoxia per se.

[0698] In many cases, significant responses are seen in multiple cell types, though this data is not apparent here. In Table 13, the cDNA clones are currently un-annotated in public domain databases. In Table 14, the cDNA clones are currently annotated, but were not so as at the priority date.

### Example 4

[0699] Additional Disclosure of the Effect of Macrophage Activation on Hypoxia Regulation of Gene Expression

[0700] In Example 2, it is shown that activated and resting macrophages respond to hypoxia in different ways, showing that the hypoxia response is not a generic phenomenon. To consolidate this data, experiments were performed with the custom array, using additional experimental conditions and with a more in-depth analysis. Significantly, the expression values used are not simple hypoxia/normoxia ratios, done separately for macrophages of differing activation status, but rather the values used allow comparison of the relative expression levels throughout the entire set of experimental conditions. Hence, for any gene, all values throughout the entire set of experimental conditions are calculated by comparison to the median level of that gene throughout the dataset. This allows a clearer appreciation of the effects of hypoxia in the context of cell activation status. The following data demonstrates that of the newly discovered genes responsive to hypoxia, expression changes are also seen in response to key cytokines of the immune system, implying functions outside of the generic response to hypoxia and metabolism. This especially applies to unannotated genes, including ESTs and hypothetical proteins, showing potential functions in inflammation and angiogenesis on the basis of cytokine-regulation.

[0701] Macrophages were derived and cultured as described elsewhere in the specification. A total of 6 experimental conditions were analysed, as shown below. Where cells were treated with cytokines or hypoxia (0.1% oxygen), this was for 6 hr. Lipopolysaccharide (LPS) (from E.coli 026:B6; Sigma), gamma Interferon (IFN) and Interleukin-10 (IL-10) were all used at a final concentration of 100 ng/ml. The effect of gamma Interferon and Lipopolysaccharide is to activate macrophages, with a Th1 biased phenotype, as found in many inflammatory conditions. Interleukin-10 is a Th2 cytokine and de-activates macrophages, and suppresses their effector functions.

[0702] Experimental

| Condition | | |
|---|---|---|
| 1. | No cytokines | Normoxia |
| 2. | No cytokines | Hypoxia |
| 3. | IL-10 | Normoxia |
| 4. | IL-10 | Hypoxia |
| 5. | LPS + IFN | Normoxia |
| 6. | LPS + IFN | Hypoxia |

[0703] In Table 15, genes are shown which respond to LPS+IFN in normoxia by producing at least a 2-fold increase in expression, indicating probable pro-inflammatory functions. From this dataset various patterns of hypoxia regulation will be appreciated on top of the effect of LPS+IFN.

[0704] For instance, the gene SCYA8 (p1I21; SeqID:479/480) is decreased in expression by hypoxia, changing from 0.54 to 0.18 between conditions #1 and #2. In condition #5 (LPS+IFN normoxia), expression is dramatically increased to a value of 19.6. When LPS+IFN is combined with hypoxia, this increase is dampened-down to a value of 12.2. So for this example, hypoxia and cell activation have opposing effects on gene expression. A similar expression profile is found for several other genes in Table 15.

[0705] In contrast, the gene P8 protein-candidate of metastasis 1 (p1F17; SeqID: 329/330) is increased in expression by hypoxia, changing from 0.26 to 1.78 between conditions #1 and #2. In condition #5 (LPS+IFN normoxia) expression is increased from condition #1 to a value of 1.16. In condition #6, (LPS+IFN normoxia) the expression is further increased to a value of 2.59. So for this example, hypoxia and cell activation have similar effects on expression (i.e. increases) and these are found to be synergistic. A similar expression profile is found for several other genes in Table 15, including for Semaphorin 4b (p1P14; SeqID:91/92/92a), which has been independently verified by RNase protection assay (see FIG. 57).

[0706] A selection of novel genes taken from Table 15 is also presented as FIG. 53. These novel genes are hence annotated here for the first time as being regulated not only by hypoxia, but also by Th1 inflammatory signals, as provided by LPS+IFN.

[0707] It will be appreciated that certain IMAGE clones were classed as novel and unannotated when the original patent filing was made (Dec. 8, 2000), but which can now be assigned to named genes. These are Uridine 5′ monophosphate hydrolase 1 (clone p1I7; SeqID:49/50) and Insulin induced protein 2 (clone p1D10; SeqID:75/76).

[0708] In Table 16, genes are shown which respond to LPS+IFN in normoxia by producing at least a 2-fold decrease in expression. From this dataset, various patterns of hypoxia regulation will be appreciated on top of the effect of LPS+IFN.

[0709] In FIG. 54, novel genes from Table 16 which are down-regulated by LPS+IFN and up-regulated by hypoxia are presented. For most of these, the combined effect of LPS+IFN AND hypoxia produces only a minor induction above the level of expression for activated normoxic cells (for example p1F8/SeqID:10/hypothetical Protein KIAA0914). In other cases, this is not the case, and hypoxia is able to over-ride the inhibitory effect of LPS+IFN on gene expression (for example p1D12/SeqID:30/hypothetical Protein KIAA1376). This clearly demonstrates the finding that different cell types or physiological states of a cell type (as here), respond to hypoxia differently.

[0710] In FIG. 55, novel genes from Table 16 which are down-regulated both by LPS+IFN and by hypoxia are presented. In many of the genes presented here, these stimuli are synergistic, with minimal expression obtained with a combination of LPS+IFN and hypoxia.

[0711] In FIG. 56, a selection of named genes from Table 16 which are down-regulated by LPS+IFN, with various responses to hypoxia are presented. For the gene, Max-interacting Protein 1 two separate clones were available on the array corresponding to this gene (p1G5 from SeqID:280 and p1D22 from SeqID:120). In the original specification, the IMAGE clone corresponding to SeqID:120 (accession AA401496) was classified as an EST, and the IMAGE clone corresponding to SeqID:280 (accession AA401496) was classified as “Max-interacting Protein 1”, as determined by the UniGene database at that time. Now it is apparent that both of these clones correspond to Max-interacting Protein 1, explaining the similarity of their expression profiles in FIG. 56. Clearly the response of this gene to hypoxia is inhibited by LPS+IFN.

[0712] The additional data showing effects of the Th1 activation stimulus LPS+IFN extends the finding of these genes as novel hypoxia regulated genes, and provides additional information about the relevance of these genes to disease mechanisms.

[0713] It will be appreciated that certain IMAGE clones were classed as novel and unannotated when the original patent filing was made (Dec. 8, 2000), but which can now be assigned to named genes. These are TRIP-Br2 (clone p1D15; SeqID:31/32), MAX-interacting protein 1 (clone p1D22; SeqID:119/120).

[0714] In Tables 15 and 16 and FIGS. 53-56, showing genes which respond to LPS+IFN, it will be noticed that some of these genes also response to the inhibitory cytokine IL-10 (e.g. Semaphorin 4b, hypothetical protein CGI-117). Other genes respond only to IL-10, but not to LPS+IFN. Specific responses to IL-10 are significant because this cytokine has been shown to have utility in suppressing inflammatory reactions (Huizinga T W et al., Rheumatology 2000, 39: 1180-8).

[0715] Table 17 shows genes responsive to IL-10 (increased or decreased) but not affected significantly by LPS+IFN. Various patterns of hypoxia regulation will be appreciated.

### Example 5

[0716] Gene Expression in Human Tumors

[0717] One of the utilities of the genes identified herein relates to the diagnosis and treatment of human tumors, on the basis that hypoxia is frequently found in tumors.

[0718] A study has been performed to examine the expression of these genes in a selection of breast and ovary tumors, comparing expression with normal adjacent tissue from the same patient. There is expected to be a large degree of variation between different patients, and the study here contains only 5 patients with a range of diagnoses. Therefore although certain genes will be identified from this data, other genes in the current specification not flagged by this study are nevertheless likely to have utility in cancer.

[0719] Patients are designated as Letters:

[0720] E: 50 year old Caucasian female. Diagnosis: ovarian adenocarcinoma. Normal ovarian tissue derived from an age-matched separate individual.

[0721] F: 60 year old female. Diagnosis: poorly differentiated adenocarcinoma. Normal ovarian tissue derived from the same individual.

[0722] G: 41 year old female. Diagnosis: moderately-differentiated adenocarcinoma. Normal ovarian tissue derived from the same individual.

[0723] H: 40 year old female. Diagnosis: invasive ductal carcinoma. Normnal breast tissue derived from the same individual.

[0724] K: 58 year old female. Diagnosis: invasive ductal carcinoma. Normal breast tissue derived from the same individual.

[0725] Data normalisation was done per-chip to correct for differences in labelling and hybridization efficiency. Per-gene normalisation was done such that the expression values of each gene are relative to the median value of that gene throughout the series of samples. By comparing the expression values under normal (nor) and tumor (turn) for a single patient, differences in expression between the normal and malignant tissue of that patient can be inferred.

[0726] In Table 18 are genes which are up-regulated at least 3-fold in at least one patient, comparing the tumor tissue to the adjacent normal tissue.

[0727] In Table 19 are genes which are down-regulated at least 3-fold in at least one patient, comparing the tumor tissue to the adjacent normal tissue.

### Example 6

[0728] Effects of Inflammatory Cytokines on Hypoxia-regulated Genes

[0729] Tumor necrosis factor alpha (TNFα) is a key pro-inflammatory cytokine both produced by and acting on the macrophage. The significance of TNFα to human disease is well established in the art. This is particularly the case in Rheumatoid arthritis and neutralising antibodies to TNFα have been reported to offer clinical utility. Because hypoxia is another pathological condition exerted on macrophages in the synovia of RA patients, synergistic effects of these two stimuli are highly relevant to the discovery of novel inflammatory targets expressed by the macrophage. To investigate this, primary human macrophages were exposed to either hypoxia (0.1% oxygen) or 100 ng/ml TNFα or to both for 6 hr. The data shown below provides further credence to the utility of the encoded proteins as inflammatory targets in macrophages and applies to any disease where hypoxia and TNFα are co-incident.

[0730] Gene expression levels were measured and compared using the custom gene array. In data analysis per-gene normalisation was set up such that expression values represent the fold-change compared with the expression in untreated normoxic cells. Genes which are increased in expression in response to TNFα by at least 2-fold, in either normoxic or hypoxic cells, are shown in Table 20. Genes which are decreased in expression in response to TNFα by at least 2-fold, in either normoxic or hypoxic cells, are shown in Table 21.

[0731] Another inflammatory cytokine implicated in diseases where hypoxia is frequently found is Interleukin-17 (IL-17). For example, this cytokine has been shown to mediate inflammation and joint destruction in arthritis (Lubberts et al J. Immunol 2001 167:1004-1013). IL-17 has also been shown to stimulate macrophages to release other key pro-inflammatory cytokines (Jovanovic et al J Immunol 1998 160:3513-21). Therefore genes which respond to both hypoxia and IL-17 are especially likely to be relevant to disease processes and have utility in the design of therapeutic products. Genes which are increased in expression in response to IL-17 by at least 2-fold, in either normoxic or hypoxic cells, are shown in Table 22. Genes which are decreased in expression in response to IL-17 by at least 2-fold, in either normoxic or hypoxic cells, are shown in Table 23.

[0732] The cytokine IL-15 is implicated in several disease in which macrophages and hypoxia both feature as elements of the inflammatory state, such as in atherosclerosis (Wuttge D M et al Am J Pathol. 2001 159:417-23) and rheumatoid arthritis (McInnes I B et al Immunol Today. 1998 19:75-9). Although the main target of IL-15 is T-cells effects have also been shown on monocytes (Badolato R et al Blood. 1997 90:2804-9). Therefore genes which respond to both hypoxia and IL-15 are especially likely to be relevant to disease processes and have utility in the design of therapeutic products. Genes which are increased in expression in response to IL-15 by at least 2-fold, in either normoxic or hypoxic cells, are shown in Table 24. Genes which are decreased in expression in response to IL-15 by at least 2-fold, in either normoxic or hypoxic cells, are shown in Table 25.

### Example 7

[0733] Rat Foetal Cardiomyocytes

[0734] Primary rat foetal cardiomyocytes provide an attractive experimental model for studying the responses of cardiac cells to ischaemia. Cells are obtained which are non-immortalized and which are seen to contract or beat in culture. It is of interest to examine how the responses of these cells to hypoxia (or related experimental conditions) compared and contrasts to other cell types. These other cell types might include those that are similarly sensitive to the effects of hypoxia (such as neurons) or might be cells that show a higher tolerance to hypoxia (such as macrophages). Experiments are performed in parallel for cardiomyocytes and other cell type(s). The responses of these specific cell types is then determined by hybridising labelled mRNA to microarrays. Alternative methods will include the construction of subtracted cDNA libraries for the individual treated cell types and assessing which genes are contained therein by sequencing.

[0735] Methods

[0736] Cardiomyocytes are harvested from heart ventricles of embryos aged E18 days, using a cell isolation kit (Neonatal cardiomyocyte isolation system; Worthington Biochemical Corporation, Lakewood, N.J. 08701). They are seeded at 5×10⁶ cells/100 cm diameter petri dish in DMEM/M199, 10% horse serum, 5% FCS, 1% penicillin, streptomycin, glutamine for 5 days at 37 C. Media is changed during the 5 days.

[0737] Other cell types used for comparison with cardiomyocytes, are cultured according to their optimum conditions and/or the standard routine. These cell types may include cardiomyocytes in a different physiological setting, such as in an intact beating heart, or a different developmental state of the cardiomyocyte, such as cardiomyoblast.

[0738] Identical seeded petri dishes are placed either in a standard tissue culture incubator (95% air/5% CO2) or in a hypoxia incubator (0.1% oxygen/5% CO2/0.1% oxygen for 6 hours. This is done separately for both cardiomyocytes and the other cell type(s) to be compared. Other experimental conditions might more closely approximate ishemia, by incorporating components additional to hypoxia.

[0739] At the end of the exposure to hypoxia, cells are placed on a chilled platform, washed in cold PBS and total RNA is extracted using RNazol B (Tel-Test, Inc; distributed by Biogenesis Ltd) following the manufacturers instructions. Where appropriate, polyadenylated mRNA is extracted from the total RNA using a commercial kit following the manufacturers instructions (Promega; PolyATract mRNA isolation System IV).

[0740] Array hybridizations and construction/analysis of subtracted cDNA libraries are performed according to standard methods or as described elsewhere in this specification.

### Example 8

[0741] Comparison of the Hypoxic-responses Between Populations of Rat Primary Cultured Neurons by a Subtraction Cloning/Array Screening Approach.

[0742] Different regions of the central nervous system display different sensitivities to hypoxia and to ischaemia. Susceptibility to tissue damage in this manner may occur as a result of intrinsic differences in gene expression between cells. To evaluate this hypothesis, primary cultures of rat neurons from different regions of the brain are established. Cultures are exposed to various experimental conditions which are pertinent to pathologies of the hypoxic/ischemic brain. These would include hypoxic insults as have been described, or to hypoxia/ischaemia where the conditions more closely approximate pathological ischemia. Either condition may be preceded by prior hypoxic-preconditioning, where transient exposure to hypoxia renders cells less sensitive to subsequent acute treatment. For all possible experimental treatments, a similar routine is performed for distinct neuron subtypes, in order to compare their responses. Such comparisons may be made by hybridizing labelled mRNA to microarrays or derivatives thereof. Alternatively subtracted libraries might be constructed individually for each treated neuron subtype, and clones which are confirmed to be changed in expression to be sequenced. The collection of genes arising from the different neuron subtypes will be compared.

[0743] Methods

[0744] Primary cultures are established according to standard procedures from embryonic rats aged from E14 to E18 (Dunnett S B, Bjorkland A (Eds.) 1992. Neural Transplantation, A Practical Approach. IRL Press). Isolated neurons include but are not limited to those from ventral mesencephalon, striatum, hippocampus, cerebellum, cerebral cortex, dorsal root ganglia and superior cervical ganglia.

[0745] Cells are maintained in culture for 3-14 days in humidified culture incubators at 37° C., 5% CO2, 95% air (Normoxia) in Neurobasal Medium (Brewer G J, 1995, Journal of Neuroscience Research 42:674-83) supplemented with B27 (both Life Technologies). For the hypoxia-preconditioning, cells are transferred to a second incubator at 37° C., 5% CO2, 94.9% Nitrogen, 0.1% Oxygen (Hypoxia) for 30-180 minutes and returned to the normoxic incubator for 24 hours (Pringle et al., 1997, Neuropathology and Applied Neurobiology 23:289-298). For the hypoxic stimulus, either independent from or subsequent to hypoxia-preconditioning, cells are transferred to the hypoxic incubator for 2-6 hours as determined in time course experiments. Additionally, as appropriate, the medium in which the cells are grown is replaced with glucose-free media for establishment of experimental ischaemia (Ray A M, Owen D E, Evans M L, Davis J B Benham, 2000. Caspase inhibitors are functionally neuroprotective against oxygen glucose deprivation induced CA1 death in rat organotypic hippocampal slices). At the end of the exposure to hypoxia (or hypoxia/ischaemia), cells are, placed on a chilled platform, washed in cold PBS and total RNA is extracted using RNazol B (Tel-Test, Inc; distributed by Biogenesis Ltd) following the manufacturers instructions. Where appropriate, polyadenylated mRNA is extracted from the total RNA using a commercial kit following the manufacturers instructions (Promega; PolyATract mRNA isolation System IV).

[0746] Array hybridizations and construction/analysis of subtracted cDNA libraries are performed according to standard methods or as described elsewhere in this specification.

### Example 9

[0747] Semaphorin 4b

[0748] cDNA libraries derived from the human brain and leukocytes were removed to obtain an unequivocal and accurate full length cDNA sequence (SEQ ID No 92a) and the accurate presumptive amino acid sequence (SEQ ID No 91).

[0749] The amino acid sequence above was derived by taking the first ATG. We have various independent lines of evidence that this is the bonafide translation initiation codon.

[0750] Basic analysis of this sequence, reveals the following motifs:

| | | |
|---|---|---|
| signal peptide (pSORT) | Start: 1 | End: 37; |
| Transmembrane (pSORT) | Start: 718 | End: 734; |
| cleavage site (pSORT) | Start: 38 | End: 38; |
| Proline rich region | Start: 758 | End: 824; |
| Sema domain (pfam) | Start: 70 | End: 503; |
| Plexin repeat (pfam) | Start: 70 | End: 548; |
| integrin, beta domain (pfam) | Start: 532 | End: 546; |
| cytoplasmic tail | Start: 735 | End: 837. |

[0751] To confirm the hypoxic regulation of Sema4b, we used RNase protection assay (see FIG. 57). Hypoxia is a feature of several inflammatory conditions often accompanied by superoxide radicals and the immune regulator gamma interferon. In this experiment we have made the following findings:

[0752] Expression is activated by hypoxia (3.3 fold)

[0753] Expression is activated by gamma interferon and LPS (3.9 fold)

[0754] Expression is activated synergistically by hypoxia plus gamma interferon/LPS (7.3 fold)

[0755] Expression is activated by superoxide radicals (5.0 fold)

[0756] To investigate the size of the mRNA and the tissue distribution, Northern blotting was done (see FIG. 58). This shows that the gene is expressed as a single transcript at relatively low levels in unstimulated human tissues.

[0757] We have also found that a molecule that is probably associated with Semaphorin 4B, called psd-95 is another macrophage hypoxia-induced protein (see SEQ ID No 299). This is based on the fact that psd-95 binds the cytoplasmic tail of Sema4c (Inagaki et al., J Biol Chem. 2001; 276(12): 9174-81), which like Sema4b, contains proline rich sequence. Therefore, both Semaphorin 4B, and a probable partner are co-ordinately regulated by hypoxia.

### Example 10

[0758] Discussion of Relevance of Individual Clones

[0759] Clone p1F12 represents hypothetical protein FLJ13611. The protein sequence encoded by hypothetical protein FLJ13611 is represented in the public databases by the accession NP_{—}079217 and is described in this patent by SEQ ID NO: 1. The nucleotide sequence is represented in the public sequence databases by the accession NM_{—}024941 and is described in this patent by SEQ ID NO: 2. Hypoxia is an important feature of several diseases, and genes that respond to this stimulus are therefore implicated in the pathogenesis and have utility in the design of therapeutic, prognostic and diagnostic products.

[0760] Clone p1F2 represents hypothetical protein FLJ20037. The protein sequence encoded by hypothetical protein FLJ20037 is represented in the public databases by the accession CAB65981 and is described in this patent by SEQ ID NO: 3. The nucleotide sequence is represented in the public sequence databases by the accession NM_{—}017633 and is described in this patent by SEQ ID NO: 4. Hypoxia is an important feature of several diseases, and genes that respond to this stimulus are therefore implicated in the pathogenesis and have utility in the design of therapeutic, prognostic and diagnostic products. Hypoxia is frequently found in human tumours where macrophage infiltrates are also found. In a series of 5 patients with either ovarian or breast cancer, hypothetical protein FLJ20037 is down-regulated in the malignant tissue as compared to adjacent normal tissue in at least one patient. We expect increased activity of the gene product to have an anti-tumour effect.

[0761] Clone p1F10 represents hypothetical protein DKFZp434P0116. The protein sequence encoded by hypothetical protein DKFZp434P0116 is represented in the public databases by the accession T46364 and is described in this patent by SEQ ID NO: 5. The nucleotide sequence is represented in the public sequence databases by the accession NM_{—}017593 and is described in this patent by SEQ ID NO: 6. Hypothetical protein DKFZp434P0116 is predicted to be a kinase due to high structural similarity with other known kinases. Hypoxia is an important feature of several diseases, and genes that respond to this stimulus are therefore implicated in the pathogenesis and have utility in the design of therapeutic, prognostic and diagnostic products. Hypothetical protein DKFZp434P0116 is repressed in macrophages activated by LPS and gamma interferon. We expect it to have an anti-inflammatory role.

[0762] Clone p1F19 represents hypothetical protein KIAA0212. The protein sequence encoded by hypothetical protein KIAA0212 is represented in the public databases by the accession BAA13203 and is described in this patent by SEQ ID NO: 7. The nucleotide sequence is represented in the public sequence databases by the accession NM_{—}014674 and is described in this patent by SEQ ID NO: 8. Hypoxia is an important feature of several diseases, and genes that respond to this stimulus are therefore implicated in the pathogenesis and have utility in the design of therapeutic, prognostic and diagnostic products.

[0763] Clone p1F8 represents hypothetical protein KIAA0914. The protein sequence encoded by hypothetical protein KIAA0914 is represented in the public databases by the accession NP_{—}055698 and is described in this patent by SEQ ID NO: 9. The nucleotide sequence is represented in the public sequence databases by the accession NM_{—}014883 and is described in this patent by SEQ ID NO: 10. Hypothetical protein KIAA0914 shows high structural similarity to Human Class I alpha 1,2-Mannosidase and conservation of active site and binding site residues, therefore we predict that hypothetical protein KIAA0914 will act as a mannosidase. Hypoxia is an important feature of several diseases, and genes that respond to this stimulus are therefore implicated in the pathogenesis and have utility in the design of therapeutic, prognostic and diagnostic products. Macrophages are key to several diseases involving hypoxia, and contribute to inflammatory processes. In these, macrophages are frequently activated by cytokines, which have been shown to be present at disease sites, so gene expression responses to both hypoxia and cytokines are especially relevant. Hypothetical protein KIAA0914 is repressed in macrophages activated by LPS and gamma interferon. We expect the gene product to have an anti-inflammatory role.

[0764] Clone p1F5 represents hypothetical protein FLJ20281. The protein sequence encoded by hypothetical protein FLJ20281 is represented in the public databases by the accession XP_{—}008736 and is described in this patent by SEQ ID NO: 11. The nucleotide sequence is represented in the public sequence databases by the accession NM_{—}017742 and is described in this patent by SEQ ID NO: 12. Hypoxia is an important feature of several diseases, and genes that respond to this stimulus are therefore implicated in the pathogenesis and have utility in the design of therapeutic, prognostic and diagnostic products. TNFalpha is an inflammatory cytokine, which acts on macrophages, and has been shown to be central to the pathophysiology and treatment of diseases including rheumatoid arthritis. Genes that change in expression in response to TNFalpha therefore have utility in the design of therapeutic, prognostic and diagnostic products for such inflammatory conditions. Hypothetical protein FLJ20281 is induced in macrophages activated by TNFalpha.

[0765] Clone p1F18 represents hypothetical protein KIAA0876. The protein sequence encoded by hypothetical protein KIAA0876 is represented in the public databases by the accession BAA74899 and is described in this patent by SEQ ID NO: 13. The nucleotide sequence is represented in the public sequence databases by the accession XM_{—}035625 and is described in this patent by SEQ ID NO: 14. Hypoxia is an important feature of several diseases, and genes that respond to this stimulus are therefore implicated in the pathogenesis and have utility in the design of therapeutic, prognostic and diagnostic products.

[0766] Clone p1F7 represents Spectrin, beta, non-erythrocytic 1. The protein sequence encoded by Spectrin, beta, non-erythrocytic 1 is represented in the public databases by the accession NP_{—}003119 and is described in this patent by SEQ ID NO: 15. The nucleotide sequence is represented in the public sequence databases by the accession NM_{—}003128 and is described in this patent by SEQ ID NO: 16. Hypoxia is an important feature of several diseases, and genes that respond to this stimulus are therefore implicated in the pathogenesis and have utility in the design of therapeutic, prognostic and diagnostic products. Hypoxia is frequently found in human tumours where macrophage infiltrates are also found. In a series of 5 patients with either ovarian or breast cancer, Spectrin, beta, non-erythrocytic 1 is down-regulated in the malignant tissue as compared to adjacent normal tissue in at least one patient. We expect increased activity of the gene product to have an anti-tumour effect.

[0767] Clone p1F21 represents Hematopoietic Zinc finger protein. The protein sequence encoded by Hematopoietic Zinc finger protein is represented in the public databases by the accession AAL08625 and is described in this patent by SEQ ID NO: 17. The nucleotide sequence is represented in the public sequence databases by the accession AK024404 and is described in this patent by SEQ ID NO: 18. Hematopoietic Zinc finger protein is a transcriptional regulator that contains a Cys2-His2 zinc finger motif. It is predicted to bind to metal response elements (MRE) and therefore activate the transcription of genes that contain a MRE sequence within their promoter region such as metallothioneins. Hypoxia is an important feature of several diseases, and genes that respond to this stimulus are therefore implicated in the pathogenesis and have utility in the design of therapeutic, prognostic and diagnostic products. There is a prejudice in the art that the response to hypoxia is generic to all cell types. Contrary to this, we show that genes are regulated by hypoxia to a greater degree in certain cell types, substantiating their utility in designing specific therapeutic products for diseases involving those cell types. Monocytes and macrophages have been implicated in the following diseases involving hypoxia: rheumatoid arthritis, atherosclerosis, cancer, COPD. Hematopoietic Zinc finger protein is preferentially induced by hypoxia in monocytes or macrophages and a restricted number of other cell types. It is therefore a candidate for specific intervention for treatment or diagnosis of the above diseases.

[0768] Clone p1F9 represents hypothetical protein KIAA0742. The protein sequence encoded by hypothetical protein KIAA0742 is represented in the public databases by the accession NP_{—}060903 and is described in this patent by SEQ ID NO: 19. The nucleotide sequence is represented in the public sequence databases by the accession AB018285 and is described in this patent by SEQ ID NO: 20. Hypoxia is an important feature of several diseases, and genes that respond to this stimulus are therefore implicated in the pathogenesis and have utility in the design of therapeutic, prognostic and diagnostic products. Macrophages are key to several diseases involving hypoxia, and contribute to inflammatory processes. In these, macrophages are frequently activated by cytokines, which have been shown to be present at disease sites, so gene expression responses to both hypoxia and cytokines are especially relevant. Hypothetical protein KIAA0742 is repressed in macrophages activated by LPS and gamma interferon. We expect it to have an anti-inflammatory role. Hypothetical protein KIAA0742 shows significant homolgy to the transcription factor hairless. We therefore propose that hypothetical protein KIAA0742 may play a crucial role in the regulation of hair growth. Accordingly, this aspect of the invention includes the use of this protein, fragments and functional equivalents of this protein, encoding nucleic acid molecules, in addition to ligands that bind specifically to this protein, in the diagnosis and treatment of hair loss.

[0769] Clone p1E13 represents hypothetical protein PRO0823. The protein sequence encoded by hypothetical protein PRO0823 is represented in the public databases by the accession AAF71073 and is described in this patent by SEQ ID NO: 21. The nucleotide sequence is represented in the public sequence databases by the accession AF116653 and is described in this patent by SEQ ID NO: 22. Hypoxia is an important feature of several diseases, and genes that respond to this stimulus are therefore implicated in the pathogenesis and have utility in the design of therapeutic, prognostic and diagnostic products. Macrophages are key to several diseases involving hypoxia, and contribute to inflammatory processes. In these, macrophages are frequently activated by cytokines, which have been shown to be present at disease sites, so gene expression responses to both hypoxia and cytokines are especially relevant. Hypothetical protein PRO0823 is repressed in macrophages activated by LPS and gamma interferon. We expect it to have an anti-inflammatory role. Hypoxia is frequently found in human tumours where macrophage infiltrates are also found. In a series of 5 patients with either ovarian or breast cancer, hypothetical protein PRO0823 is down-regulated in the malignant tissue as compared to adjacent normal tissue in at least one patient. We expect increased activity of the gene product to have an anti-tumour effect.

[0770] Clones p1D1 and p1D2 represent the hypothetical protein FLJ10134. The protein sequence encoded by hypothetical protein FLJ10134 is represented in the public databases by the accession NP_{—}060474 and is described in this patent by SEQ ID NO: 23. The nucleotide sequence is represented in the public sequence databases by the accession NM_{—}018004 and is described in this patent by SEQ ID NO: 24. Hypoxia is an important feature of several diseases, and genes that respond to this stimulus are therefore implicated in the pathogenesis and have utility in the design of therapeutic, prognostic and diagnostic products. HIF1alpha and EPAS1 are transcription factors that mediate the response to hypoxia of several genes, and have them selves been implicated in specific diseases. By adenoviral over-expression of EPAS1, we show augmentation of the hypoxic induction of certain genes, further confirming their status as responsive to hypoxia. Hypothetical protein FLJ10134 has been shown to be induced by hypoxia to a greater degree following adenoviral over-expression of EPAS1. Macrophages are key to several diseases involving hypoxia, and contribute to inflammatory processes. In these, macrophages are frequently activated by cytokines, which have been shown to be present at disease sites, so gene expression responses to both hypoxia and cytokines are especially relevant. Hypothetical protein FLJ101134 is repressed in macrophages activated by LPS and gamma interferon. We expect it to have an anti-inflammatory role. Hypoxia is frequently found in human tumours where macrophage infiltrates are also found. In a series of 5 patients with either ovarian or breast cancer, hypothetical protein FLJ101134 is down-regulated in the malignant tissue as compared to adjacent normal tissue in at least one patient. We expect increased activity of the gene product to have an anti-tumour effect.

[0771] Clone p1D4 represents hypothetical protein FLJ20500. The protein sequence encoded by hypothetical protein FLJ20500 is represented in the public databases by the accession NP_{—}061931 and is described in this patent by SEQ ID NO: 25. The nucleotide sequence is represented in the public sequence databases by the accession NM_{—}019058 and is described in this patent by SEQ ID NO: 26. Hypoxia is an important feature of several diseases, and genes that respond to this stimulus are therefore implicated in the pathogenesis and have utility in the design of therapeutic, prognostic and diagnostic products. Hypothetical protein FLJ20500 is preferentially induced by hypoxia in mammary epithelial cells.

[0772] Clone p1D9 represents hypothetical protein DKFZP564D116. The protein sequence encoded by hypothetical protein DKFZP564D116 is represented in the public databases by the accession T08708 and is described in this patent by SEQ ID NO: 27. The nucleotide sequence is represented in the public sequence databases by the accession AL050022 and is described in this patent by SEQ ID NO: 28. Hypoxia is an important feature of several diseases, and genes that respond to this stimulus are therefore implicated in the pathogenesis and have utility in the design of therapeutic, prognostic and diagnostic products. Macrophages are key to several diseases involving hypoxia, and contribute to inflammatory processes. In these, macrophages are frequently activated by cytokines, which have been shown to be present at disease sites, so gene expression responses to both hypoxia and cytokines are especially relevant. Hypothetical protein DKFZP564D116 is repressed in macrophages activated by LPS and gamma interferon. TNFalpha is an inflammatory cytokine, which acts on macrophages, and has been shown to be central to the pathophysiology and treatment of diseases including rheumatoid arthritis. Genes that change in expression in response to TNFalpha therefore have utility in the design of therapeutic, prognostic and diagnostic products for such inflammatory conditions. Hypothetical protein DKFZP564D116 is induced in macrophages activated by TNFalpha.

[0773] Clone p1D12 represents hypothetical protein KIAA1376. The protein sequence encoded by hypothetical protein KIAA1376 is represented in the public databases by the accession BAA92614 and is described in this patent by SEQ ID NO: 29. The nucleotide sequence is represented in the public sequence databases by the accession AB037797 and is described in this patent by SEQ ID NO: 30. Hypoxia is an important feature of several diseases, and genes that respond to this stimulus are therefore implicated in the pathogenesis and have utility in the design of therapeutic, prognostic and diagnostic products. Macrophages are key to several diseases involving hypoxia, and contribute to inflammatory processes. In these, macrophages are frequently activated by cytokines, which have been shown to be present at disease sites, so gene expression responses to both hypoxia and cytokines are especially relevant. Hypothetical protein KIAA1376 is repressed in macrophages activated by LPS and gamma interferon. We expect it to have an anti-inflammatory role.

[0774] Clone p1D15 represents TRIP-Br2. The protein sequence encoded by TRIP-Br2 is represented in the public databases by the accession NP_{—}055570 and is described in this patent by SEQ ID NO: 31. The nucleotide sequence is represented in the public sequence databases by the accession NM_{—}014755 and is described in this patent by SEQ ID NO: 32.. TRIP-BR2 is a PHD zinc finger and bromodomain interacting protein transcriptional regulator and is involved in the regulation of cell cycle progression. Its hypoxia-regulation is likely to have important disease-relevant effects. Hypoxia is an important feature of several diseases, and genes that respond to this stimulus are therefore implicated in the pathogenesis and have utility in the design of therapeutic, prognostic and diagnostic products. The response of renal epithelial cells to hypoxia is pertinent to kidney failure, especially regarding the medullary tissue. TRIP-Br2 is preferentially induced by hypoxia in renal epithelial cells. Macrophages are key to several diseases involving hypoxia, and contribute to inflammatory processes. In these, macrophages are frequently activated by cytokines, which have been shown to be present at disease sites, so gene expression responses to both hypoxia and cytokines are especially relevant. TRIP-Br2 is repressed in macrophages activated by LPS and gamma interferon.

[0775] Clone p1D16 represents hypothetical protein FLJ20308. The protein sequence encoded by hypothetical protein FLJ20308 is represented in the public databases by the accession XP_{—}039852 and is described in this patent by SEQ ID NO: 33. The nucleotide sequence is represented in the public sequence databases by the accession AK000315 and is described in this patent by SEQ ID NO: 34. Hypoxia is an important feature of several diseases, and genes that respond to this stimulus are therefore implicated in the pathogenesis and have utility in the design of therapeutic, prognostic and diagnostic products. Macrophages are key to several diseases involving hypoxia, and contribute to inflammatory processes. In these, macrophages are frequently activated by cytokines, which have been shown to be present at disease sites, so gene expression responses to both hypoxia and cytokines are especially relevant. Hypothetical protein FLJ20308 is repressed in macrophages activated by LPS and gamma interferon. We expect it to have an anti-inflammatory role.

[0776] Clone p1J13 represents hypothetical nuclear factor SBBI22. The protein sequence encoded by hypothetical nuclear factor SBBI22 is represented in the public databases by the accession NP_{—}065128 and is described in this patent by SEQ ID NO: 35. The nucleotide sequence is represented in the public sequence databases by the accession NM_{—}020395 and is described in this patent by SEQ ID NO: 36. Hypoxia is an important feature of several diseases, and genes that respond to this stimulus are therefore implicated in the pathogenesis and have utility in the design of therapeutic, prognostic and diagnostic products.

[0777] Clone p1I22 represents hypothetical protein KIAA1429. The protein sequence encoded by hypothetical protein KIAA1429 is represented in the public databases by the accession BAA92667 and is described in this patent by SEQ ID NO: 37. The nucleotide sequence is represented in the public sequence databases by the accession AB037850 and is described in this patent by SEQ ID NO: 38. Hypoxia is an important feature of several diseases, and genes that respond to this stimulus are therefore implicated in the pathogenesis and have utility in the design of therapeutic, prognostic and diagnostic products.

[0778] Clone p1J6 represents hypothetical protein FLJ10206. The protein sequence encoded by hypothetical protein FLJ10206 is represented in the public databases by the accession AAH06108 and is described in this patent by SEQ ID NO: 39. The nucleotide sequence is represented in the public sequence databases by the accession NM_{—}018025 and is described in this patent by SEQ ID NO: 40. Hypoxia is an important feature of several diseases, and genes that respond to this stimulus are therefore implicated in the pathogenesis and have utility in the design of therapeutic, prognostic and diagnostic products. Macrophages are key to several diseases involving hypoxia, and contribute to inflammatory processes. In these, macrophages are frequently activated by cytokines, which have been shown to be present at disease sites, so gene expression responses to both hypoxia and cytokines are especially relevant. Hypothetical protein FLJ10206 is repressed in macrophages activated by IL-17 and is also repressed in macrophages activated by IL-15. These are pro-inflammatory cytokines, and we expect the hypothetical protein FLJ10206 to have an anti-inflammatory role.

[0779] Clone p1I5 represents hypothetical protein FLJ10815. The protein sequence encoded by hypothetical protein FLJ10815 is represented in the public databases by the accession BAA91830 and is described in this patent by SEQ ID NO: 41. The nucleotide sequence is represented in the public sequence databases by the accession NM_{—}018231 and is described in this patent by SEQ ID NO: 42. Hypothetical protein FLJ10815 is structurally similar to an alpha/beta barrel structure. Hypoxia is an important feature of several diseases, and genes that respond to this stimulus are therefore implicated in the pathogenesis and have utility in the design of therapeutic, prognostic and diagnostic products. Macrophages are key to several diseases involving hypoxia, and contribute to inflammatory processes. In these, macrophages are frequently activated by cytokines, which have been shown to be present at disease sites, so gene expression responses to both hypoxia and cytokines are especially relevant. Hypothetical protein FLJ10815 is repressed in macrophages activated by LPS and gamma interferon. We expect it to have an anti-inflammatory role.

[0780] Clone p1I13 represents hypothetical protein FWJ11100. The protein sequence encoded by hypothetical protein FLJ11100 is represented in the public databases by the accession NP_{—}060701 and is described in this patent by SEQ ID NO: 43. The nucleotide sequence is represented in the public sequence databases by the accession NM_{—}018321 and is described in this patent by SEQ ID NO: 44. Hypoxia is an important feature of several diseases, and genes that respond to this stimulus are therefore implicated in the pathogenesis and have utility in the design of therapeutic, prognostic and diagnostic products.

[0781] Clone p1I17 represents hypothetical protein FLJ20644. The protein sequence encoded by hypothetical protein FLJ20644 is represented in the public databases by the accession NP_{—}060387 and is described in this patent by SEQ.ID NO: 45. Hypothetical protein FLJ20644 is a putative Serine/threonine phosphotase. Region 250-450 shows high structural similarity to other Serine/threonine phosphotases. The nucleotide sequence is represented in the public sequence databases by the accession NM_{—}017917 and is described in this patent by SEQ ID NO: 46. Hypoxia is an important feature of several diseases, and genes that respond to this stimulus are therefore implicated in the pathogenesis and have utility in the design of therapeutic, prognostic and diagnostic products.

[0782] Clone p1I15 represents hypothetical protein CGI-117. The protein sequence encoded by hypothetical protein CGI-117 is represented in the public databases by the accession Q9Y3C1 and is described in this patent by SEQ ID NO: 47. The nucleotide sequence is represented in the public sequence databases by the accession NM_{—}016391 and is described in this patent by SEQ ID NO: 48. Hypoxia is an important feature of several diseases, and genes that respond to this stimulus are therefore implicated in the pathogenesis and have utility in the design of therapeutic, prognostic and diagnostic products. HIF1alpha and EPAS1 are transcription factors that mediate the response to hypoxia of several genes, and have them selves been implicated in specific diseases. By adenoviral over-expression of HIF1alpha or EPAS1 we show augmentation of the hypoxic induction of certain genes, further confirming their status as responsive to hypoxia. Hypothetical protein CGI-117 has been shown to be induced by hypoxia to a greater degree following adenoviral over-expression of either HIF1alpha or EPAS1. Macrophages are key to several diseases involving hypoxia, and contribute to inflammatory processes. In these, macrophages are frequently activated by cytokines, which have been shown to be present at disease sites, so gene expression responses to both hypoxia and cytokines are especially relevant. Hypothetical protein CGI-117 is repressed in macrophages activated by LPS and gamma interferon. We expect it to have an anti-inflammatory role.

[0783] Clone p1I7 represents Uridine 5′ monophosphate hydrolase 1. The protein sequence encoded by Uridine 5′ monophosphate hydrolase 1 is represented in the public databases by the accession NP_{—}057573 and is described in this patent by SEQ ID NO: 49. The nucleotide sequence is represented in the public sequence databases by the accession NM_{—}016489 and is described in this patent by SEQ ID NO: 50. Hypoxia is an important feature of several diseases, and genes that respond to this stimulus are therefore implicated in the pathogenesis and have utility in the design of therapeutic, prognostic and diagnostic products. Macrophages are key to several diseases involving hypoxia, and contribute to inflammatory processes. In these, macrophages are frequently activated by cytokines, which have been shown to be present at disease sites, so gene expression responses to both hypoxia and cytokines are especially relevant. Uridine 5′ monophosphate hydrolase 1 is induced in macrophages activated by LPS and gamma interferon and is also is induced in macrophages activated by IL-15. We expect it to have a pro-inflammatory role, and its inhibition may have an anti-inflammatory effect.

[0784] The protein sequence encoded by hypothetical protein KIAA0014 is represented in the public databases by the accession NP_{—}055480 and is described in this patent by SEQ ID NO: 51. The nucleotide sequence is represented in the public sequence databases by the accession NM_{—}014665 and is described in this patent by SEQ ID NO: 52. Hypoxia is an important feature of several diseases, and genes that respond to this stimulus are therefore implicated in the pathogenesis and have utility in the design of therapeutic, prognostic and diagnostic products.

[0785] Clone p1I4 represents hypothetical protein HSPC196. The protein sequence encoded by hypothetical protein HSPC196 is represented in the public databases by the accession NP_{—}057548 and is described in this patent by SEQ ID NO: 53. The nucleotide sequence is represented in the public sequence databases by the accession NM_{—}016464 and is described in this patent by SEQ ID NO: 54. Hypoxia is an important feature of several diseases, and genes that respond to this stimulus are therefore implicated in the pathogenesis and have utility in the design of therapeutic, prognostic and diagnostic products. Macrophages are key to several diseases involving hypoxia, and contribute to inflammatory processes. In these, macrophages are frequently activated by cytokines, which have been shown to be present at disease sites, so gene expression responses to both hypoxia and cytokines are especially relevant. Hypothetical protein HSPC196 is repressed in macrophages activated by LPS and gamma interferon. We expect it to have an anti-inflammatory role.

[0786] Clone p1I8 represents hypothetical protein FLJ11296. The protein sequence encoded by hypothetical protein FLJ11296 is represented in the public databases by the accession XP_{—}004747 and is described in this patent by SEQ ID NO: 55. The nucleotide sequence is represented in the public sequence databases by the accession NM_{—}018384 and is described in this patent by SEQ ID NO: 56. Hypoxia is an important feature of several diseases, and genes that respond to this stimulus are therefore implicated in the pathogenesis and have utility in the design of therapeutic, prognostic and diagnostic products.

[0787] Clone p1I16 represents hypothetical protein KLAA1668. The protein sequence encoded by hypothetical protein KIAA1668 is represented in the public databases by the accession BAB33338 and is described in this patent by SEQ ID NO: 57. The nucleotide sequence is represented in the public sequence databases by the accession AB051455 and is described in this patent by SEQ ID NO: 58. Hypoxia is an important feature of several diseases, and genes that respond to this stimulus are therefore implicated in the pathogenesis and have utility in the design of therapeutic, prognostic and diagnostic products.

[0788] Clone p1I11represents SECIS binding protein 2. The protein sequence encoded by SECIS binding protein 2 is represented in the public databases by the accession AAK57518 and is described in this patent by SEQ ID NO: 59. The nucleotide sequence is represented in the public sequence databases by the accession AF380995 and is described in this patent by SEQ ID NO: 60. SECIS binding protein 2 is a crucial component in the complex required for the translation of mammalian selenoprotein mRNAs. Selenoproteins are important responders to redox conditions and many selenoproteins are known to protect from cell death. Our demonstration of the hypoxia induction of SECIS binding protein 2 opens new avenues for diagnosis and therapeutic intervention. Hypoxia is an important feature of several diseases, and genes that respond to this stimulus are therefore implicated in the pathogenesis and have utility in the design of therapeutic, prognostic and diagnostic products. Hypoxia is frequently found in human tumours where macrophage infiltrates are also found. In a series of 5 patients with either ovarian or breast cancer, SECIS binding protein 2 is down-regulated in the malignant tissue as compared to adjacent normal tissue in at least one patient. We expect increased activity of the gene product to have an anti-tumour effect.

[0789] Clone p1E8 represents cDNA: FLJ22249 fis, clone HRC02674. The sequence cDNA: FLJ22249 fis, clone HRC02674 is not represented in the public databases by a protein accession. The nucleotide sequence is represented in the public sequence databases by the accession AK025902 and is described in this patent by SEQ ID NO: 62. Hypoxia is an important feature of several diseases, and genes that respond to this stimulus are therefore implicated in the pathogenesis and have utility in the design of therapeutic, prognostic and diagnostic products.

[0790] Clone p1E18 represents Plexin C1. The protein sequence encoded by Plexin C1 is represented in the public databases by the accession NP_{—}005752 and is described in this patent by SEQ ID NO: 63. The nucleotide sequence is represented in the public sequence databases by the accession NM_{—}005761 and is described in this patent by SEQ ID NO: 64. Plexins are a large family of receptors for transmembrane, secreted, and GPI-anchored semaphorins in vertebrates and play a significant role in signal transduction [Tamagnone et al 1999, Cell 99:71-80]. Elsewhere in this patent we disclose hypoxic regulation of a new semaphorin 4b, and we propose co-regulation of these molecules by hypoxia and their relevance to inflammatory disease, its diagnosis and therapy. Hypoxia is an important feature of several diseases, and genes that respond to this stimulus are therefore implicated in the pathogenesis and have utility in the design of therapeutic, prognostic and diagnostic products. Macrophages are key to several diseases involving hypoxia, and contribute to inflammatory processes. In these, macrophages are frequently activated by cytokines, which have been shown to be present at disease sites, so gene expression responses to both hypoxia and cytokines are especially relevant. Plexin C1 is repressed in macrophages activated by LPS and gamma interferon.

[0791] Clone p1E16 represents cDNA DKFZp586E1624. The sequence cDNA DKFZp586E1624 is not represented in the public databases by a protein accession. The nucleotide sequence is represented in the public sequence databases by the accession AL110152 and is described in this patent by SEQ ID NO: 66. Hypoxia is an important feature of several diseases, and genes that respond to this stimulus are therefore implicated in the pathogenesis and have utility in the design of therapeutic, prognostic and diagnostic products. HIF1alpha and EPAS1 are transcription factors that mediate the response to hypoxia of several genes, and have them selves been implicated in specific diseases. By adenoviral over-expression of EPAS1 we show augmentation of the hypoxic induction of certain genes, further confirming their status as responsive to hypoxia. Its preferential regulation by EPAS1 provides a route to preferential intervention, to avoid toxicity to other tissues. The cDNA DKFZp586E1624 has been shown to be induced by hypoxia to a greater degree following adenoviral over-expression of EPAS1. Endothelial cells are key to angiogenesis, a process implicated in several diseases associated with hypoxia, including cancer and rheumatoid arthritis. The CDNA DKFZp586E1624 is preferentially induced by hypoxia in endothelial cells. We expect this gene product to have a pro-angiogenic effect, and its inhibition to have an anti-angiogenic effect.

[0792] Clones p1D5 and p1D6 represent ERO1 (S. cerevisiae)-like. The protein sequence encoded by ERO1 (S. cerevisiae)-like is represented in the public databases by the accession NP_{—}055399 and is described in this patent by SEQ ID NO: 67. The nucleotide sequence is represented in the public sequence databases by the accession NM_{—}014584 and is described in this patent by SEQ ID NO: 68. ERO1 (S. cerevisiae)-like has been shown to be a flavin adenine dinucleotide (FAD) binding protein. Binding of FAD enables ERO1 (S. cerevisiae)-like to oxidise protein disulfide isomerase (PDI). We propose that the oxidisation of PDI by ERO1 (S. cerevisiae)-like stops PDI autodegradation, therefore increasing levels of the protein. Increased levels of PDI have been shown to be neuroprotective by inhibiting apoptotic cell death. Hypoxia is an important feature of several diseases, and genes that respond to this stimulus are therefore implicated in the pathogenesis and have utility in the design of therapeutic, prognostic and diagnostic products. HIF1alpha and EPAS1 are transcription factors that mediate the response to hypoxia of several genes, and have them selves been implicated in specific diseases. By adenoviral over-expression of EPAS1 we show augmentation of the hypoxic induction of certain genes, further confirming their status as responsive to hypoxia. ERO1 (S. cerevisiae)-like has been shown to be induced by hypoxia to a greater degree following adenoviral over-expression of EPAS1. Its preferential regulation by EPAS1 provides a route to preferential intervention, to avoid toxicity to other tissues. ERO1 (S. cerevisiae)-like is preferentially induced by hypoxia in mammary epithelial cells. Macrophages are key to several diseases involving hypoxia, and contribute to inflammatory processes. In these, macrophages are frequently activated by cytokines, which have been shown to be present at disease sites, so gene expression responses to both hypoxia and cytokines are especially relevant. ERO1 (S. cerevisiae)-like is repressed in macrophages activated by LPS and gamma interferon. Hypoxia is frequently found in human tumours where macrophage infiltrates are also found. In a series of 5 patients with either ovarian or breast cancer, ERO1 (S. cerevisiae)-like is up-regulated in the malignant tissue as compared to adjacent normal tissue in at least one patient.

[0793] Clone p1E12 represents hypothetical protein DKFZP434E1723. The protein sequence encoded by hypothetical protein DKFZP434E1723 is represented in the public databases by the accession XP_{—}05338 and is described in this patent by SEQ ID NO: 69. The nucleotide sequence is represented in the public sequence databases by the accession BC010005 and is described in this patent by SEQ ID NO: 70. Hypoxia is an important feature of several diseases, and genes that respond to this stimulus are therefore implicated in the pathogenesis and have utility in the design of therapeutic, prognostic and diagnostic products.

[0794] Clone p1E10 represents cDNA FLJ11041 fis clone PLACE1004405. The sequence encoded by cDNA FLJ11041 fis, clone PLACE1004405 is not represented in the public databases by a protein accession. The nucleotide sequence is represented in the public sequence databases by the accession AK001903 and is described in this patent by SEQ ID NO: 72. Hypoxia is an important feature of several diseases, and genes that respond to this stimulus are therefore implicated in the pathogenesis and have utility in the design of therapeutic, prognostic and diagnostic products. Macrophages are key to several diseases involving hypoxia, and contribute to inflammatory processes. In these, macrophages are frequently activated by cytokines, which have been shown to be present at disease sites, so gene expression responses to both hypoxia and cytokines are especially relevant. The cDNA FLJ11041 fis clone PLACE1004405 is induced in macrophages activated by LPS and gamma interferon. We expect it to have a pro-inflammatory role, and its inhibition may have an anti-inflammatory effect.

[0795] Clone p1C21 represents Tubulin, beta, 4. The protein sequence encoded by Tubulin, beta, 4 is represented in the public databases by the accession NP_{—}006077 and is described in this patent by SEQ ID NO: 73. The nucleotide sequence is represented in the public sequence databases by the accession NM_{—}006086 and is described in this patent by SEQ ID NO: 74. Hypoxia is an important feature of several diseases, and genes that respond to this stimulus are therefore implicated in the pathogenesis and have utility in the design of therapeutic, prognostic and diagnostic products.

[0796] Clone p1D10 represents Insulin induced protein 2. The protein sequence encoded by Insulin induced protein 2 is represented in the public databases by the accession AAD43048 and is described in this patent by SEQ ID NO: 75. The nucleotide sequence is represented in the public sequence databases by the accession AF125392 and is described in this patent by SEQ ID NO: 76. Hypoxia is an important feature of several diseases, and genes that respond to this stimulus are therefore implicated in the pathogenesis and have utility in the design of therapeutic, prognostic and diagnostic products. Macrophages are key to several diseases involving hypoxia, and contribute to inflammatory processes. In these, macrophages are frequently activated by cytokines, which have been shown to be present at disease sites, so gene expression responses to both hypoxia and cytokines are especially relevant. Insulin induced protein 2 is induced in macrophages activated by LPS and gamma interferon. We expect it to have a pro-inflammatory role, and its inhibition may have an anti-inflammatory effect.

[0797] Clones p1D13 and p1A22 represent Adenylate kinase 3. The protein sequence encoded by Adenylate kinase 3 is represented in the public databases by the accession NP_{—}037542 and is described in this patent by SEQ ID NO: 77 and 263. The nucleotide sequence is represented in the public sequence databases by the accession NM_{—}013410 and is described in this patent by SEQ ID NO: 78 and 264. Hypoxia is an important feature of several diseases, and genes that respond to this stimulus are therefore implicated in the pathogenesis and have utility in the design of therapeutic, prognostic and diagnostic products. Macrophages are key to several diseases involving hypoxia, and contribute to inflammatory processes. In these, macrophages are frequently activated by cytokines, which have been shown to be present at disease sites, so gene expression responses to both hypoxia and cytokines are especially relevant. Adenylate kinase 3 is induced in macrophages activated by LPS and gamma interferon. TNFalpha is an inflammatory cytokine, which acts on macrophages, and has been shown to be central to the pathophysiology and treatment of diseases including rheumatoid arthritis. Genes that change in expression in response to TNFalpha therefore have utility in the design of therapeutic, prognostic and diagnostic products for such inflammatory conditions. Adenylate kinase 3 is induced in macrophages activated by TNFalpha.

[0798] Clone p1E9 represents a novel PI-3-kinase adapter. The protein sequence encoded by the novel PI-3-kinase adapter is not represented in the public databases by a protein accession but is described in this patent by SEQ ID NO: 79. The nucleotide sequence of an unannotated EST corresponding to the novel PI-3-kinase adapter is represented in the public sequence databases by the accession R62339 and is described in this patent by SEQ ID NO: 80. Hypoxia is an important feature of several diseases, and genes that respond to this stimulus are therefore implicated in the pathogenesis and have utility in the design of therapeutic, prognostic and diagnostic products. There is a prejudice in the art that the response to hypoxia is generic to all cell types. Contrary to this, we show that genes are regulated by hypoxia to a greater degree in certain cell types, substantiating their utility in designing specific therapeutic products for diseases involving those cell types. Monocytes and macrophages have been implicated in the following diseases involving hypoxia: rheumatoid arthritis, atherosclerosis, cancer, COPD and peripheral arterial disease. The novel PI-3-kinase adapter is preferentially induced by hypoxia in monocytes or macrophages, indicating utility of the encoded protein in the design of therapeutic, prognostic and diagnostic products addressing diseases involving macrophages and hypoxia. In a gene array analysis it is expressed in hypoxic monocytes and macrophages at levels 6-fold higher than the median expression level of this gene throughout 9 other cell types in either normoxia or hypoxia. In more sensitive TaqMan analysis the novel PI-3-kinase adapter it is found to be expressed at approximately 1000 times the levels of 9 other cell types, all exposed to hypoxia for 18 hr. The relevance of the novel PI-3-kinase adapter to human disease is also appreciated from comparison with a related murine gene, BCAP. It is known that this gene is phosphorylated by the tyrosine kinase, Syk. We also show novel data regarding Syk, in that it is also induced in response to hypoxia in a tissue specific manner identical to that of the novel PI-3-kinase adapter. Therefore the biological relevance and utility of our discovery of hypoxic induction of the novel PI-3-kinase adapter gene is further highlighted.

[0799] Clone p1F1 represents an unannotated EST. The protein sequence encoded by this EST is not represented in the public databases by a protein accession. The nucleotide sequence is represented in the public sequence databases by the accession AA489477 and is described in this patent by SEQ ID NO: 82. Hypoxia is an important feature of several diseases, and genes that respond to this stimulus are therefore implicated in the pathogenesis and have utility in the design of therapeutic, prognostic and diagnostic products.

[0800] Clone p1E7 represents a novel Metallothionein. The protein sequence encoded by Novel Metallothionein is not represented in the public databases by a protein accession but is described in this patent by SEQ ID NO: 83. The nucleotide sequence is represented in the public sequence databases by the accession R06601 and is described in this patent by SEQ ID NO: 84. Metallothioneins can act as an antioxidant and free-radical scavenger and are therefore protective against cell death in hypoxia. Hypoxia is an important feature of several diseases, and genes that respond to this stimulus are therefore implicated in the pathogenesis and have utility in the design of therapeutic, prognostic and diagnostic products. HIF1alpha and EPAS1 are transcription factors that mediate the response to hypoxia of several genes, and have them selves been implicated in specific diseases. By adenoviral over-expression of HIF1alpha we show augmentation of the hypoxic induction of certain genes, further confirming their status as responsive to hypoxia. The novel Metallothionein represented by SEQ ID NO: 84 has been shown to be induced by hypoxia to a greater degree following adenoviral over-expression of HIF1 alpha. Hepatocytes are the main cell type of the liver and genes that are induced in response to hypoxia in this cell type are relevant to development of diagnostics and therapeutics towards liver diseases involving hypoxia, including cirrhosis. The novel Metallothionein represented by SEQ ID NO: 84 is preferentially induced by hypoxia in hepatocytes. Macrophages are key to several diseases involving hypoxia, and contribute to inflammatory processes. In these, macrophages are frequently activated by cytokines, which have been shown to be present at disease sites, so gene expression responses to both hypoxia and cytokines are especially relevant. The novel Metallothionein represented by SEQ ID NO: 84 is induced in macrophages activated by LPS and gamma interferon.

[0801] Clone p1E6 represents EGL nine (C. elegans) homolog 3. The protein sequence encoded by EGL nine (C. elegans) homolog 3 is represented in the public databases by the accession NP_{—}071356 and is described in this patent by SEQ ID NO: 85. The nucleotide sequence is represented in the public sequence databases by the accession NM_{—}022073 and is described in this patent by SEQ ID NO: 86. Hypoxia is an important feature of several diseases, and genes that respond to this stimulus are therefore implicated in the pathogenesis and have utility in the design of therapeutic, prognostic and diagnostic products. HIF1alpha and EPAS1 are transcription factors that mediate the response to hypoxia of several genes, and have them selves been implicated in specific diseases. By adenoviral over-expression of EPAS1 we show augmentation of the hypoxic induction of certain genes, further confirming their status as responsive to hypoxia. EGL nine (C. elegans) homolog 3 has been shown to be induced by hypoxia to a greater degree following adenoviral over-expression of EPAS1. Its preferential regulation by EPAS1 provides a route to preferential intervention, to avoid toxicity to other tissues. Hepatocytes are the main cell type of the liver and genes that are induced in response to hypoxia in this cell type are relevant to development of diagnostics and therapeutics towards liver diseases involving hypoxia, including cirrhosis. EGL nine (C. elegans) homolog 3 is preferentially induced by hypoxia in hepatocytes. We find that EGLN3 and a related human gene C1orf12 (seq ID 89/90) both of which are predicted to be proline hydroxylases, are expressed at differing absolute expression levels in different tissues. For instance, in the hypoxic hepatocyte (6 hr) the normalized expression values of EGLN and c1orf12 are 0.015 and 0.0074 respectively, i.e. EGLN being the dominant gene. In contrast, in the neuroblastoma cell line SH-SY5Y, the normalized expression values of EGLN and c1orf12 after 6 hr hypoxia are 0.0012 and 0.108 respectively, i.e. c1orf12 being the dominant gene by a large margin. This data demonstrates that c1ORF12 and EGLN3 are not constitutively expressed at an equal amount in different tissues indicating specificity of function. Therefore therapeutic products may be developed based on this data, with the goal of modulating proline hydroxylation of target proteins (such as HIF1alpha) in specific tissues, based on the differing expression profile of c1ORF12 and EGLN3 in those tissues.

[0802] Clone p1D14 represents C1orf12. The protein sequence encoded by C1orf12 is represented in the public databases by the accession NP_{—}071334 and is described in this patent by SEQ ID NO: 89. The nucleotide sequence is represented in the public sequence databases by the accession NM_{—}022051 and is described in this patent by SEQ ID NO: 90. Hypoxia is an important feature of several diseases, and genes that respond to this stimulus are therefore implicated in the pathogenesis and have utility in the design of therapeutic, prognostic and diagnostic products. We find that C1orf12 and a related human gene EGLN3 (seq ID 85/86) both of which are predicted to be proline hydroxylases, are expressed at differing absolute expression levels in different tissues. For instance, in the hypoxic hepatocyte (6 hr) the normalized expression values of EGLN and c1orf12 are 0.015 and 0.0074 respectively, i.e. EGLN being the dominant gene. In contrast, in the neuroblastoma cell line SH-SY5Y, the normalized expression values of EGLN and c1orf12 after 6 hr hypoxia are 0.0012 and 0.108 respectively, i.e. c1orf12 being the dominant gene by a large margin. This data demonstrates that c1ORF12 and EGLN3 are not constitutively expressed at an equal amount in different tissues indicating specificity of function. Therefore therapeutic products may be developed based on this data, with the goal of modulating proline hydroxylation of target proteins (such as HIF1alpha) in specific tissues, based on the differing expression profile of c1ORF12 and EGLN3 in those tissues.

[0803] Clone p2B1 represents PRAME. The protein sequence encoded by PRAME is represented in the public databases by the accession NP_{—}006106 and is described in this patent by SEQ ID NO: 87. The nucleotide sequence is represented in the public sequence databases by the accession NM_{—}006115 and is described in this patent by SEQ ID NO: 88. Hypoxia is an important feature of several diseases, and genes that respond to this stimulus are therefore implicated in the pathogenesis and have utility in the design of therapeutic, prognostic and diagnostic products. Hypoxia is frequently found in human tumours where macrophage infiltrates are also found. In a series of 5 patients with either ovarian or breast cancer, PRAME is up-regulated in the malignant tissue as compared to adjacent normal tissue in at least one patient. PRAME is a well-known tumour-associated antigen. Our surprising demonstration of its hypoxia-regulation provides for an important diagnostic test to distinguish false-positive results. In addition, we show the relevance of PRAME to hypoxia-related functions of tumours such as angiogenesis.

[0804] Clones p1D17 and p1P14 represent Semaphorin 4b. The protein sequence encoded by Semaphorin 4b is represented in the public databases by the accession BAB21836 and is described in this patent by SEQ ID NO: 91. The nucleotide sequence is represented in the public sequence databases by the accession AB051532 and is described in this patent by SEQ ID NO: 92. Hypoxia is an important feature of several diseases, and genes that respond to this stimulus are therefore implicated in the pathogenesis and have utility in the design of therapeutic, prognostic and diagnostic products. The response of renal epithelial cells to hypoxia is pertinent to kidney failure, especially regarding the medullary tissue. Semaphorin 4b is preferentially induced by hypoxia in renal epithelial cells. Macrophages are key to several diseases involving hypoxia, and contribute to inflammatory processes. In these, macrophages are frequently activated by cytokines, which have been shown to be present at disease sites, so gene expression responses to both hypoxia and cytokines are especially relevant. Semaphorin 4b is induced in macrophages activated by LPS and gamma interferon.. Semaphorin 4b is also induced by the the presence of reactive oxygen species. We expect it to have a pro-inflammatory role, and its inhibition may have an anti-inflammatory effect. We have cited elsewhere in this specification that a plexin is hypoxia-regulated, and we propose a functional relationship between these two molecules. Hypoxia is frequently found in human tumours where macrophage infiltrates are also found. In a series of 5 patients with either ovarian or breast cancer, Semaphorin 4b is up-regulated in the malignant tissue as compared to adjacent normal tissue in at least one patient. Semaphorin 4b is also induced in response to skuperoxide radicals, as found in various disease states, implying utility. Semaphorin 4b is predicted to function in modulating several cellular processes key to human disease, including angiogenesis, inflammation, immune cell migration and tissue remodelling. Other Semaphorins including Semaphorin E, which are induced in response to hypoxia will also be implicated in these disease processes and have utility as described for Semaphorin 4b.

[0805] Clone p1C24 represents SLC25A19. The protein sequence encoded by SLC25A19 is represented in the public databases by the accession NP_{—}068380 and is described in this patent by SEQ ID NO: 93. The nucleotide sequence is represented in the public sequence databases by the accession NM_{—}021734 and is described in this patent by SEQ ID NO: 94. SLC25A19 transports deoxynucleotides into mitochondria and is therefore essential for mtDNA synthesis. Hypoxia is an important feature of several diseases, and genes that respond to this stimulus are therefore implicated in the pathogenesis and have utility in the design of therapeutic, prognostic and diagnostic products.

[0806] Clone p1D3 represents Serine carboxypeptidase 1. The protein sequence encoded by Serine carboxypeptidase 1 is represented in the public databases by the accession NP_{—}067639 and is described in this patent by SEQ ID NO: 95. The nucleotide sequence is represented in the public sequence databases by the accession NM_{—}021626 and is described in this patent by SEQ ID NO: 96. Hypoxia is an important feature of several diseases, and genes that respond to this stimulus are therefore implicated in the pathogenesis and have utility in the design of therapeutic, prognostic and diagnostic products. Macrophages are key to several diseases involving hypoxia, and contribute to inflammatory processes. In these, macrophages are frequently activated by cytokines, which have been shown to be present at disease sites, so gene expression responses to both hypoxia and cytokines are especially relevant. Serine carboxypeptidase 1 is repressed in macrophages activated by LPS and gamnma interferon. TNFalpha is an inflammatory cytokine, which acts on macrophages, and has been shown to be central to the pathophysiology and treatment of diseases including rheumatoid arthritis. Genes that change in expression in response to TNFalpha therefore have utility in the design of therapeutic, prognostic and diagnostic products for such inflammatory conditions. Serine carboxypeptidase 1 is induced in macrophages activated by TNFalpha. Increased serine carboxypeptidase activity in glial cells has been shown to result in neurological abnormalities, due to the degradation of essential neuro-active factors. Similarly, peripheral neurological disease could result from such activity in macrophages. Our demonstration of hypoxia regulation of serine carboxypeptidase activity opens a route for diagnosis and treatment of these diseases. Hypoxia is frequently found in human tumours where macrophage infiltrates are also found. In a series of 5 patients with either ovarian or breast cancer, Serine carboxypeptidase 1 is down-regulated in the malignant tissue as compared to adjacent normal tissue in at least one patient.

[0807] Clone p1E14 represents an unknown mRNA (schizophrenia-linked). The protein sequence encoded by the unknown mRNA (schizophrenia-linked) is not represented in the public databases by a protein accession. The nucleotide sequence is represented in the public sequence databases by the accession AY010112 and is described in this patent by SEQ ID NO: 98. Hypoxia is an important feature of several diseases, and genes that respond to this stimulus are therefore implicated in the pathogenesis and have utility in the design of therapeutic, prognostic and diagnostic products. Macrophages are key to several diseases involving hypoxia, and contribute to inflammatory processes. In these, macrophages are frequently activated by cytokines, which have been shown to be present at disease sites, so gene expression responses to both hypoxia and cytokines are especially relevant. TNFalpha is an inflammatory cytokine, which acts on macrophages, and has been shown to be central to the pathophysiology and treatment of diseases including rheumatoid arthritis. Genes that change in expression in response to TNFalpha therefore have utility in the design of therapeutic, prognostic and diagnostic products for such inflammatory conditions. Unknown mRNA (schizophrenia-linked) is induced in macrophages activated by TNFalpha. There are many enzymic activities that can give rise to neurological abnormalities, and their hypoxia regulation is pertinent to the diagnosis and treatment of such diseases, including schizophrenia.

[0808] Clone p1E20 represents Myo-inositol monophosphatase A3. The protein sequence encoded by Myo-inositol monophosphatase A3 is represented in the public databases by the accession AAK52336 and is described in this patent by SEQ ID NO: 99. The nucleotide sequence is represented in the public sequence databases by the accession NM_{—}017813 and is described in this patent by SEQ ID NO: 100. Hypoxia is an important feature of several diseases, and genes that respond to this stimulus are therefore implicated in the pathogenesis and have utility in the design of therapeutic, prognostic and diagnostic products. As refered to elsewhere in this specification, we have found several components of the phosphatidylinisotol second messenger system to be hypoxia-regulated. This system has profound effects which are relevant to many diseases with known associations with hypoxia and ischaemia. Local and transient ischaemia is relevant to such diseases as rheumatoid arthritis and atherosclerosis, and also potentially to such diseases as schizophrenia and bi-polar disorder. It is instructive that lithium, which is a well-recognised treatment for affective disorders, appears to operate via the phosphatidylinisotol system [Pettegrew et al 2001, Bipolar Disord 3:189-201]. Macrophages are key to several diseases involving hypoxia, and contribute to inflammatory processes. In these, macrophages are frequently activated by cytokines, which have been shown to be present at disease sites, so gene expression responses to both hypoxia and cytokines are especially relevant. Myo-inositol monophosphatase A3 is repressed in macrophages activated by LPS and gamma interferon.

[0809] Clone p2A24 represents an unannotated EST. The protein sequence encoded by this EST is not represented in the public databases by a protein accession. The nucleotide sequence is represented in the public sequence databases by the accession AA521314 and is described in this patent by SEQ ID NO: 102. Hypoxia is an important feature of several diseases, and genes that respond to this stimulus are therefore implicated in the pathogenesis and have utility in the design of therapeutic, prognostic and diagnostic products.

[0810] Clone p1E17 represents hypothetical protein FLJ31668. The protein sequence encoded by hypothetical protein FLJ31668 is represented in the public databases by the accession BAB71124 and is described in this patent by SEQ ID NO: 103. The nucleotide sequence is represented in the public sequence databases by the accession AK056230 and is described in this patent by SEQ ID NO: 104. Hypoxia is an important feature of several diseases, and genes that respond to this stimulus are therefore implicated in the pathogenesis and have utility in the design of therapeutic, prognostic and diagnostic products.

[0811] Clone p1E19 represents an unannotated EST. The protein sequence encoded by this EST is not represented in the public databases by a protein accession. The nucleotide sequence is represented in the public sequence databases by the accession R51835 and is described in this patent by SEQ ID NO: 106. Hypoxia is an important feature of several diseases, and genes that respond to this stimulus are therefore implicated in the pathogenesis and have utility in the design of therapeutic, prognostic and diagnostic products. Hypoxia is frequently found in human tumours where macrophage infiltrates are also found. In a series of 5 patients with either ovarian or breast cancer, the EST represented by SEQ ID NO: 106 is up-regulated in the malignant tissue as compared to adjacent normal tissue in at least one patient.

[0812] Clone p1E15 represents cDNA YI27F12. The protein sequence encoded by cDNA YI27F12 is not represented in the public databases by a protein accession. The nucleotide sequence is represented in the public sequence databases by the accession AF075018 and is described in this patent by SEQ ID NO: 108. Hypoxia is an important feature of several diseases, and genes that respond to this stimulus are therefore implicated in the pathogenesis and have utility in the design of therapeutic, prognostic and diagnostic products. The cDNA YI27F12 is induced in macrophages treated with the inhibitory cytokine IL-10. The cDNA YI27F12 is repressed in macrophages activated by IL-17. We expect the product of cDNA YI27F12 to have an anti-inflammatory role.

[0813] Clone p1E11 represents an unannotated EST. The protein sequence encoded by this EST is not represented in the public databases by a protein accession. The nucleotide sequence is represented in the public sequence databases by the accession R69248 and is described in this patent by SEQ ID NO: 110. Hypoxia is an important feature of several diseases, and genes that respond to this stimulus are therefore implicated in the pathogenesis and have utility in the design of therapeutic, prognostic and diagnostic products.

[0814] Clone p1E23 represents cDNA FLJ14041 fis, clone HEMBA1005780. The protein sequence encoded by cDNA FLJ14041 fis, clone HEMBA1005780 is not represented in the public databases by a protein accession. The nucleotide sequence is represented in the public sequence databases by the accession AK024103 and is described in this patent by SEQ ID NO: 112. Hypoxia is an important feature of several diseases, and genes that respond to this stimulus are therefore implicated in the pathogenesis and have utility in the design of therapeutic, prognostic and diagnostic products.

[0815] Clone p1E21 represents Glutamate-cysteine ligase, modifier subunit. The protein sequence encoded by Glutamate-cysteine ligase, modifier subunit is represented in the public databases by the accession NP_{—}002052 and is described in this patent by SEQ ID NO: 113. The nucleotide sequence is represented in the public sequence databases by the accession NM_{—}002061 and is described in this patent by SEQ ID NO: 114. Hypoxia is an important feature of several diseases, and genes that respond to this stimulus are therefore implicated in the pathogenesis and have utility in the design of therapeutic, prognostic and diagnostic products. Glutamate-cysteine ligase is the rate-limiting enzyme of glutathione synthesis, and this enzyme is relevant to cell survival under stress. Hypoxia is frequently found in human tumours where macrophage infiltrates are also found. In a series of 5 patients with either ovarian or breast cancer, Glutamate-cysteine ligase, modifier subunit is up-regulated in the malignant tissue as compared to adjacent normal tissue in at least one patient.

[0816] Clone p1D23 represents PTEN. The protein sequence encoded by PTEN is represented in the public databases by the accession NP_{—}000305 and is described in this patent by SEQ ID NO: 115. The nucleotide sequence is represented in the public sequence databases by the accession NM_{—}000314 and is described in this patent by SEQ ID NO: 116. PTEN is a member of the mixed function, serine/threonine/tyrosine phosphatase subfamily of protein phosphatases. Its physiological substrates, however, are primarily 3-phosphorylated inositol phospholipids, which are products of phosphoinositide 3-kinases [Downes et al 2001, Biochem Soc Trans 29:846-51]. Hypoxia-regulation of this gene is a further element in the hypoxic regulation of this important second messenger system. Hypoxia is an important feature of several diseases, and genes that respond to this stimulus are therefore implicated in the pathogenesis and have utility in the design of therapeutic, prognostic and diagnostic products.

[0817] Clone p1D24 represents an unannotated EST. The protein sequence encoded by this EST is not represented in the public databases by a protein accession. The nucleotide sequence is represented in the public sequence databases by the accession T73780 and is described in this patent by SEQ ID NO: 118. Hypoxia is an important feature of several diseases, and genes that respond to this stimulus are therefore implicated in the pathogenesis and have utility in the design of therapeutic, prognostic and diagnostic products. The response of renal epithelial cells to hypoxia is pertinent to kidney failure, especially regarding the medullary tissue. The EST represented by SEQ ID NO: 118 is preferentially induced by hypoxia in renal epithelial cells. Macrophages are key to several diseases involving hypoxia, and contribute to inflammatory processes. In these, macrophages are frequently activated by cytokines, which have been shown to be present at disease sites, so gene expression responses to both hypoxia and cytokines are especially relevant. The EST represented by SEQ ID NO: 118 is induced in macrophages activated by LPS and gamma interferon.

[0818] Clones p1D22 and p1G5 represent MAX-interacting protein 1. The protein sequence encoded by MAX-interacting protein 1 is represented in the public databases by the accession NP_{—}005953 and is described in this patent by SEQ ID NO: 119 and 279. The nucleotide sequence is represented in the public sequence databases by the accession NM_{—}005962 and is described in this patent by SEQ ID NO: 120 and 280. MAX-interacting protein 1 is a negative regulator of myc oncoprotein with tumor suppressor properties. Hypoxia is an important feature of several diseases, and genes that respond to this stimulus are therefore implicated in the pathogenesis and have utility in the design of therapeutic, prognostic and diagnostic products. Macrophages are key to several diseases involving hypoxia, and contribute to inflammatory processes. In these, macrophages are frequently activated by cytokines, which have been shown to be present at disease sites, so gene expression responses to both hypoxia and cytokines are especially relevant. MAX-interacting protein 1 is repressed in macrophages activated by LPS and gamma interferon.

[0819] Clone p1E2 represents Mannosidase, alpha, class 1A, member 1. The protein sequence encoded by Mannosidase, alpha, class 1A, member 1 is represented in the public databases by the accession NP_{—}005898 and is described in this patent by SEQ ID NO: 121. The nucleotide sequence is represented in the public sequence databases by the accession NM_{—}005907 and is described in this patent by SEQ ID NO: 122. Hypoxia is an important feature of several diseases, and genes that respond to this stimulus are therefore implicated in the pathogenesis and have utility in the design of therapeutic, prognostic and diagnostic products. Hypoxia is frequently found in human tumours where macrophage infiltrates are also found. In a series of 5 patients with either ovarian or breast cancer, Mannosidase, alpha, class 1A, member 1 is down-regulated in the malignant tissue as compared to adjacent normal tissue in at least one patient.

[0820] Clone p1E1 represents an unannotated EST. The protein sequence encoded by this EST is not represented in the public databases by a protein accession. The nucleotide sequence is represented in the public sequence databases by the accession AA446361 and is described in this patent by SEQ ID NO: 124. Hypoxia is an important feature of several diseases, and genes that respond to this stimulus are therefore implicated in the pathogenesis and have utility in the design of therapeutic, prognostic and diagnostic products. Macrophages are key to several diseases involving hypoxia, and contribute to inflammatory processes. In these, macrophages are frequently activated by cytokines, which have been shown to be present at disease sites, so gene expression responses to both hypoxia and cytokines are especially relevant. The EST represented by SEQ ID NO: 124 is repressed in macrophages activated by LPS and gamma interferon.

[0821] Clone p1E4 represents an unannotated EST. The protein sequence encoded by this EST is not represented in the public databases by a protein accession. The nucleotide sequence is represented in the public sequence databases by the accession AA931411 and is described in this patent by SEQ ID NO: 126. Hypoxia is an important feature of several diseases, and genes that respond to this stimulus are therefore implicated in the pathogenesis and have utility in the design of therapeutic, prognostic and diagnostic products. Macrophages are key to several diseases involving hypoxia, and contribute to inflammatory processes. In these, macrophages are frequently activated by cytokines, which have been shown to be present at disease sites, so gene expression responses to both hypoxia and cytokines are especially relevant. The EST represented by SEQ ID NO: 126 is repressed in macrophages activated by LPS and gamma interferon. We expect this gene product to have an anti-inflammatory role. Hypoxia is frequently found in human tumours where macrophage infiltrates are also found. In a series of 5 patients with either ovarian or breast cancer, the EST represented by SEQ ID NO: 126 is down-regulated in the malignant tissue as compared to adjacent normal tissue in at least one patient.

[0822] Clone p1D18 represents cDNA FLJ13443 fis, clone PLACE1002853. The protein sequence encoded by cDNA FLJ13443 fis, clone PLACE1002853 is not represented in the public databases by a protein accession. The nucleotide sequence is represented in the public sequence databases by the accession AK023505 and is described in this patent by SEQ ID NO: 128. Hypoxia is an important feature of several diseases, and genes that respond to this stimulus are therefore implicated in the pathogenesis and have utility in the design of therapeutic, prognostic and diagnostic products. Macrophages are key to several diseases involving hypoxia, and contribute to inflammatory processes. In these, macrophages are frequently activated by cytokines, which have been shown to be present at disease sites, so gene expression responses to both hypoxia and cytokines are especially relevant. The cDNA FLJ13443 fis, clone PLACE1002853 is repressed in macrophages activated by LPS and gamma interferon. We expect it to have an anti-inflammatory role.

[0823] Clone p1D21 represents hypothetical protein FLJ22622. The protein sequence encoded by hypothetical protein FLJ22622 is represented in the public databases by the accession BAB15424 and is described in this patent by SEQ ID NO: 129. The nucleotide sequence is represented in the public sequence databases by the accession NM_{—}025151 and is described in this patent by SEQ ID NO: 130. Hypoxia is an important feature of several diseases, and genes that respond to this stimulus are therefore implicated in the pathogenesis and have utility in the design of therapeutic, prognostic and diagnostic products. The response of renal epithelial cells to hypoxia is pertinent to kidney failure, especially regarding the medullary tissue. Hypothetical protein FLJ22622 is preferentially induced by hypoxia in renal epithelial cells. Macrophages are key to several diseases involving hypoxia, and contribute to inflammatory processes. In these, macrophages are frequently activated by cytokines, which have been shown to be present at disease sites, so gene expression responses to both hypoxia and cytokines are especially relevant. Hypothetical protein FLJ22622 is repressed in macrophages activated by LPS and gamma interferon. We expect it to have an anti-inflammatory role. Hypoxia is frequently found in human tumours where macrophage infiltrates are also found. In a series of 5 patients with either ovarian or breast cancer, hypothetical protein FLJ22622 is up-regulated in the malignant tissue as compared to adjacent normal tissue in at least one patient.

[0824] Clone p1C22 represents CD84-H1. The protein sequence encoded by CD84-H1 is represented in the public databases by the accession AAK69052 and is described in this patent by SEQ ID NO: 131. The nucleotide sequence is represented in the public sequence databases by the accession AF275725 and is described in this patent by SEQ ID NO: 132. Hypoxia is an important feature of several diseases, and genes that respond to this stimulus are therefore implicated in the pathogenesis and have utility in the design of therapeutic, prognostic and diagnostic products.

[0825] Clone p1C23 represents hypothetical protein FLJ12832. The protein sequence encoded by hypothetical protein FLJ12832 is represented in the public databases by the accession XP_{—}043394 and is described in this patent by SEQ ID NO: 133. The nucleotide sequence is represented in the public sequence databases by the accession AK022894 and is described in this patent by SEQ ID NO: 134. Hypothetical protien FLJ12832 is a putative ubiquitin as it shows high structural similarity to ubiquitin C and contains a ubiquitin domain. Hypoxia is an important feature of several diseases, and genes that respond to this stimulus are therefore implicated in the pathogenesis and have utility in the design of therapeutic, prognostic and diagnostic products.

[0826] Clone p1D11 represents an unannotated EST. The protein sequence encoded by this EST is not represented in the public databases by a protein accession. The nucleotide sequence is represented in the public sequence databases by the accession AA251748 and is described in this patent by SEQ ID NO: 136. Hypoxia is an important feature of several diseases, and genes that respond to this stimulus are therefore implicated in the pathogenesis and have utility in the design of therapeutic, prognostic and diagnostic products.

[0827] Clones p1E3 and p1F16 represent CYP1B1. The protein sequence encoded by CYP1B1 is represented in the public databases by the accession NP_{—}000095 and is described in this patent by SEQ ID NO: 137 and 325. The nucleotide sequence is represented in the public sequence databases by the accession NM_{—}000104 and is described in this patent by SEQ ID NO: 138 and 326. Hypoxia is an important feature of several diseases, and genes that respond to this stimulus are therefore implicated in the pathogenesis and have utility in the design of therapeutic, prognostic and diagnostic products. There is a prejudice in the art that the response to hypoxia is generic to all cell types. Contrary to this, we show that genes are regulated by hypoxia to a greater degree in certain cell types, substantiating their utility in designing specific therapeutic products for diseases involving those cell types. Monocytes and macrophages have been implicated in the following diseases involving hypoxia: rheumatoid arthritis, atherosclerosis, cancer, COPD. CYP1B1 is preferentially induced by hypoxia in monocytes or macrophages and a restricted number of other cell types. Macrophages are key to several diseases involving hypoxia, and contribute to inflammatory processes. In these, macrophages are frequently activated by cytokines, which have been shown to be present at disease sites, so gene expression responses to both hypoxia and cytokines are especially relevant. CYP1B1 is repressed in macrophages activated by LPS and gamma interferon. TNFalpha is an inflammatory cytokine, which acts on macrophages, and has been shown to be central to the pathophysiology and treatment of diseases including rheumatoid arthritis. Genes that change in expression in response to TNFalpha therefore have utility in the design of therapeutic, prognostic and diagnostic products for such inflammatory conditions. CYP1B1 is induced in macrophages activated by TNFalpha. Hypoxia is frequently found in human tumours where macrophage infiltrates are also found. In a series of 5 patients with either ovarian or breast cancer, CYP1B1 is up-regulated and also down regulated in the malignant tissue as compared to adjacent normal tissue in at least one patient.

[0828] Clone p1D20 represents hypothetical protein KIAA1125. The protein sequence encoded by hypothetical protein KIAA1125 is represented in the public databases by the accession XP_{—}012932 and is described in this patent by SEQ ID NO: 139. The nucleotide sequence is represented in the public sequence databases by the accession AB032951 and is described in this patent by SEQ ID NO: 140. Hypoxia is an important feature of several diseases, and genes that respond to this stimulus are therefore implicated in the pathogenesis and have utility in the design of therapeutic, prognostic and diagnostic products.

[0829] Clone p1E5 represents Hepcidin antimicrobial peptide. The protein sequence encoded by Hepcidin antimicrobial peptide is represented in the public databases by the accession NP_{—}066998 and is described in this patent by SEQ ID NO: 141. The nucleotide sequence is represented in the public sequence databases by the accession NM_{—}021175 and is described in this patent by SEQ ID NO: 142. Hypoxia is an important feature of several diseases, and genes that respond to this stimulus are therefore implicated in the pathogenesis and have utility in the design of therapeutic, prognostic and diagnostic products. Hepatocytes are the main cell type of the liver and genes that are induced in response to hypoxia in this cell type are relevant to development of diagnostics and therapeutics towards liver diseases involving hypoxia, including cirrhosis. Hepcidin antimicrobial peptide is preferentially induced by hypoxia in hepatocytes. Hepcidin antimicrobial peptide is induced in macrophages treated with the inhibitory cytokine IL-10. TNFalpha is an inflammatory cytokine, which acts on macrophages, and has been shown to be central to the pathophysiology and treatment of diseases including rheumatoid arthritis. Genes that change in expression in response to TNFalpha therefore have utility in the design of therapeutic, prognostic and diagnostic products for such inflammatory conditions. Hepcidin antimicrobial peptide is repressed in macrophages activated by TNFalpha.

[0830] Clone p1D19 represents an unannotated EST. The protein sequence encoded by this EST is not represented in the public databases by a protein accession. The nucleotide sequence is represented in the public sequence databases by the accession R68736 and is described in this patent by SEQ ID NO: 144. Hypoxia is an important feature of several diseases, and genes that respond to this stimulus are therefore implicated in the pathogenesis and have utility in the design of therapeutic, prognostic and diagnostic products. Macrophages are key to several diseases involving hypoxia, and contribute to inflammatory processes. In these, macrophages are frequently activated by cytokines, which have been shown to be present at disease sites, so gene expression responses to both hypoxia and cytokines are especially relevant. The EST represented by SEQ ID NO: 144 is induced in macrophages activated by LPS and gamma interferon and is also induced in macrophages activated by IL-15. We expect the gene product relevant to the EST represented by SEQ ID NO: 144 to have a pro-inflammatory role, and its inhibition may have an anti-inflammatory effect.

[0831] Clone p2A15 represents Sialyltransferase. The protein sequence encoded by Sialyltransferase is represented in the public databases by the accession NP_{—}006447 and is described in this patent by SEQ ID NO: 145. The nucleotide sequence is represented in the public sequence databases by the accession NM_{—}006456 and is described in this patent by SEQ ID NO: 146. Hypoxia is an important feature of several diseases, and genes that respond to this stimulus are therefore implicated in the pathogenesis and have utility in the design of therapeutic, prognostic and diagnostic products.

[0832] Clone p1I14 represents cDNA DKFZp564D016. The protein sequence encoded by cDNA DKFZp564D016 is not represented in the public databases by a protein accession. The nucleotide sequence is represented in the public sequence databases by the accession AL050021 and is described in this patent by SEQ ID NO: 148. Hypoxia is an important feature of several diseases, and genes that respond to this stimulus are therefore implicated in the pathogenesis and have utility in the design of therapeutic, prognostic and diagnostic products.

[0833] Clone p1I2 represents cDNA FLJ11302 fis, clone PLACE1009971. The protein sequence encoded by cDNA FLJ11302 fis, clone PLACE1009971 is not represented in the public databases by a protein accession. The nucleotide sequence is represented in the public sequence databases by the accession AK002164 and is described in this patent by SEQ ID NO: 150. Hypoxia is an important feature of several diseases, and genes that respond to this stimulus are therefore implicated in the pathogenesis and have utility in the design of therapeutic, prognostic and diagnostic products. Macrophages are key to several diseases involving hypoxia, and contribute to inflammatory processes. In these, macrophages are frequently activated by cytokines, which have been shown to be present at disease sites, so gene expression responses to both hypoxia and cytokines are especially relevant. The cDNA FLJ11302 fis, clone PLACE1009971 is repressed in macrophages activated by LPS and gamma interferon. We expect it to have an anti-inflammatory role.

[0834] Clone p1I12 represents hypothetical protein MGC4549. The protein sequence encoded by hypothetical protein MGC4549 is represented in the public databases by the accession XP_{—}032794 and is described in this patent by SEQ ID NO: 151. The nucleotide sequence is represented in the public sequence databases by the accession NM_{—}032377 and is described in this patent by SEQ ID NO: 152. Hypoxia is an important feature of several diseases, and genes that respond to this stimulus are therefore implicated in the pathogenesis and have utility in the design of therapeutic, prognostic and diagnostic products. Hypothetical protein MGC4549 is induced in macrophages treated with the inhibitory cytokine IL-10. Hypothetical protein MGC4549 is repressed in macrophages activated by IL-17 and is also repressed in macrophages activated by IL-15. We expect it to have an anti-inflammatory role.

[0835] Clone p1I3 represents ELMO2. The protein sequence encoded by ELMO2 is represented in the public databases by the accession AAL14467 and is described in this patent by SEQ ID NO: 153. The nucleotide sequence is represented in the public sequence databases by the accession XM_{—}012933 and is described in this patent by SEQ ID NO: 154. Hypoxia is an important feature of several diseases, and genes that respond to this stimulus are therefore implicated in the pathogenesis and have utility in the design of therapeutic, prognostic and diagnostic products. This gene has been shown recently to promote phagocytosis and cell shape changes [Gumienny et al 2001, Cell 107:27-41]. These functions are typical of the macrophage, and are likely to play a role in macrophage-associated diseases.

[0836] Clone p1I10 represents an unannotated EST. The protein sequence encoded by this EST is not represented in the public databases by a protein accession. The nucleotide sequence is represented in the public sequence databases by the accession AA420992 and is described in this patent by SEQ ID NO: 156. Hypoxia is an important feature of several diseases, and genes that respond to this stimulus are therefore implicated in the pathogenesis and have utility in the design of therapeutic, prognostic and diagnostic products.

[0837] Clone p1H18 represents Ubiquitin specific protease 7. The protein sequence encoded by Ubiquitin specific protease 7 is represented in the public databases by the accession NP_{—}003461 and is described in this patent by SEQ ID NO: 157. The nucleotide sequence is represented in the public sequence databases by the accession NM_{—}003470 and is described in this patent by SEQ ID NO: 158. Hypoxia is an important feature of several diseases, and genes that respond to this stimulus are therefore implicated in the pathogenesis and have utility in the design of therapeutic, prognostic and diagnostic products. Hypoxia is frequently found in human tumours where macrophage infiltrates are also found. In a series of 5 patients with either ovarian or breast cancer, Ubiquitin specific protease 7 is up-regulated in the malignant tissue as compared to adjacent normal tissue in at least one patient. We expect decreased activity of the gene product to have an anti-tumour effect.

[0838] Clone p1H24 represents Nucleolar phosphoprotein Nopp34. The protein sequence encoded by Nucleolar phosphoprotein Nopp34 is represented in the public databases by the accession NP_{—}115766 and is described in this patent by SEQ ID NO: 159. The nucleotide sequence is represented in the public sequence databases by the accession NM_{—}032390 and is described in this patent by SEQ ID NO: 160. Hypoxia is an important feature of several diseases, and genes that respond to this stimulus are therefore implicated in the pathogenesis and have utility in the design of therapeutic, prognostic and diagnostic products.

[0839] Clone p1E22 represents cDNA FLJ13618 fis, clone PLACE1010925. The protein sequence encoded by cDNA FLJ13618 fis, clone PLACE1010925 is not represented in the public databases by a protein accession. The nucleotide sequence is represented in the public sequence databases by the accession AK023680 and is described in this patent by SEQ ID NO: 162. Hypoxia is an important feature of several diseases, and genes that respond to this stimulus are therefore implicated in the pathogenesis and have utility in the design of therapeutic, prognostic and diagnostic products. Macrophages are key to several diseases involving hypoxia, and contribute to inflammatory processes. In these, macrophages are frequently activated by cytokines, which have been shown to be present at disease sites, so gene expression responses to both hypoxia and cytokines are especially relevant. The cDNA FLJ13618 fis, clone PLACE1010925 is induced in macrophages activated by LPS and gamma interferon.

[0840] Clone p1H21 represents hypothetical protein FLJ13511. The protein sequence encoded by hypothetical protein FLJ13511 is represented in the public databases by the accession NP_{—}149014 and is described in this patent by SEQ ID NO: 163. The nucleotide sequence is represented in the public sequence databases by the accession NM_{—}033025 and is described in this patent by SEQ ID NO: 164. Hypoxia is an important feature of several diseases, and genes that respond to this stimulus are therefore implicated in the pathogenesis and have utility in the design of therapeutic, prognostic and diagnostic products. There is a prejudice in the art that the response to hypoxia is generic to all cell types. Contrary to this, we show that genes are regulated by hypoxia to a greater degree in certain cell types, substantiating their utility in designing specific therapeutic products for diseases involving those cell types. Monocytes and macrophages have been implicated in the following diseases involving hypoxia: rheumatoid arthritis, atherosclerosis, cancer, COPD. Hypothetical protein FLJ13511 is preferentially induced by hypoxia in monocytes or macrophages and a restricted number of other cell types. Hypoxia is frequently found in human tumours where macrophage infiltrates are also found. In a series of 5 patients with either ovarian or breast cancer, hypothetical protein FLJ13511 is down-regulated in the malignant tissue as compared to adjacent normal tissue in at least one patient.

[0841] Clone p1I1 represents Ribosomal RNA intergenic spacer. The protein sequence encoded by Ribosomal RNA intergenic spacer is not represented in the public databases by a protein accession. The nucleotide sequence is represented in the public sequence databases by the accession AA664228 and is described in this patent by SEQ ID NO: 166. Hypoxia is an important feature of several diseases, and genes that respond to this stimulus are therefore implicated in the pathogenesis and have utility in the design of therapeutic, prognostic and diagnostic products.

[0842] Clone p1H14 represents an unannotated EST. The protein sequence encoded by this EST is not represented in the public databases by a protein accession. The nucleotide sequence is represented in the public sequence databases by the accession R44397 and is described in this patent by SEQ ID NO: 168. Hypoxia is an important feature of several diseases, and genes that respond to this stimulus are therefore implicated in the pathogenesis and have utility in the design of therapeutic, prognostic and diagnostic products.

[0843] Clone p1H11 represents Carboxypeptidase M. The protein sequence encoded by Carboxypeptidase M is represented in the public databases by the accession NP_{—}001865 and is described in this patent by SEQ ID NO: 169. The nucleotide sequence is represented in the public sequence databases by the accession NM_{—}001874 and is described in this patent by SEQ ID NO: 170. Hypoxia is an important feature of several diseases, and genes that respond to this stimulus are therefore implicated in the pathogenesis and have utility in the design of therapeutic, prognostic and diagnostic products.

[0844] Clone p1H17 represents an unannotated EST. The protein sequence encoded by this EST is not represented in the public databases by a protein accession. The nucleotide sequence is represented in the public sequence databases by the accession W87747 and is described in this patent by SEQ ID NO: 172. Hypoxia is an important feature of several diseases, and genes that respond to this stimulus are therefore implicated in the pathogenesis and have utility in the design of therapeutic, prognostic and diagnostic products. Hypoxia is frequently found in human tumours where macrophage infiltrates are also found. In a series of 5 patients with either ovarian or breast cancer, the EST represented by SEQ ID NO: 172 is up-regulated and also down-regulated in the malignant tissue as compared to adjacent normal tissue in at least one patient.

[0845] Clone p1H12 represents an unannotated EST. The protein sequence encoded by this EST is not represented in the public databases by a protein accession. The nucleotide sequence is represented in the public sequence databases by the accession AA973568 and is described in this patent by SEQ ID NO: 174. Hypoxia is an important feature of several diseases, and genes that respond to this stimulus are therefore implicated in the pathogenesis and have utility in the design of therapeutic, prognostic and diagnostic products.

[0846] Clone p1H7 represents an unannotated EST. The protein sequence encoded by this EST is not represented in the public databases by a protein accession. The nucleotide sequence is represented in the public sequence databases by the accession T98529 and is described in this patent by SEQ ID NO: 176. Hypoxia is an important feature of several diseases, and genes that respond to this stimulus are therefore implicated in the pathogenesis and have utility in the design of therapeutic, prognostic and diagnostic products.

[0847] Clone p1H15 represents an unannotated EST. The protein sequence encoded by this EST is not represented in the public databases by a protein accession. The nucleotide sequence is represented in the public sequence databases by the accession AA022679 and is described in this patent by SEQ ID NO: 178. Hypoxia is an important feature of several diseases, and genes that respond to this stimulus are therefore implicated in the pathogenesis and have utility in the design of therapeutic, prognostic and diagnostic products. Hypoxia is frequently found in human tumours where macrophage infiltrates are also found. In a series of 5 patients with either ovarian or breast cancer, the EST represented by SEQ ID NO: 178 is up-regulated and also down-regulated in the malignant tissue as compared to adjacent normal tissue in at least one patient.

[0848] Clone p1H20 represents an unannotated EST. The protein sequence encoded by EST is not represented in the public databases by a protein accession. The nucleotide sequence is represented in the public sequence databases by the accession H17921 and is described in this patent by SEQ ID NO: 180. Hypoxia is an important feature of several diseases, and genes that respond to this stimulus are therefore implicated in the pathogenesis and have utility in the design of therapeutic, prognostic and diagnostic products. Hypoxia is frequently found in human tumours where macrophage infiltrates are also found. In a series of 5 patients with either ovarian or breast cancer, the EST represented by SEQ ID NO: 180 is up-regulated in the malignant tissue as compared to adjacent normal tissue in at least one patient. We expect decreased activity of the gene product to have an anti-tumour effect.

[0849] Clone p1H8 represents ABL. The protein sequence encoded by ABL is represented in the public databases by the accession NP_{—}009297 and is described in this patent by SEQ ID NO: 181. The nucleotide sequence is represented in the public sequence databases by the accession NM_{—}007313 and is described in this patent by SEQ ID NO: 182. Hypoxia is an important feature of several diseases, and genes that respond to this stimulus are therefore implicated in the pathogenesis and have utility in the design of therapeutic, prognostic and diagnostic products. ABL is induced in macrophages treated with the inhibitory cytokine IL-10. ABL is repressed in macrophages activated by IL-17 and is also repressed in macrophages activated by IL-15. We expect it to have an anti-inflammatory role Hypoxia is frequently found in human tumours where macrophage infiltrates are also found. In a series of 5 patients with either ovarian or breast cancer, ABL is up-regulated in the malignant tissue as compared to adjacent normal tissue in at least one patient.

[0850] Clone p1H16 represents an unannotated EST. The protein sequence encoded by this EST is not represented in the public databases by a protein accession. The nucleotide sequence is represented in the public sequence databases by the accession W91958 and is described in this patent by SEQ ID NO: 184. Hypoxia is an important feature of several diseases, and genes that respond to this stimulus are therefore implicated in the pathogenesis and have utility in the design of therapeutic, prognostic and diagnostic products. Hypoxia is frequently found in human tumours where macrophage infiltrates are also found. In a series of 5 patients with either ovarian or breast cancer, the EST represented by SEQ ID NO: 184 is up-regulated in the malignant tissue as compared to adjacent normal tissue in at least one patient.

[0851] Clone p1H9 represents an unannotated EST. The protein sequence encoded by this EST is not represented in the public databases by a protein accession. The nucleotide sequence is represented in the public sequence databases by the accession R63694 and is described in this patent by SEQ ID NO: 186. Hypoxia is an important feature of several diseases, and genes that respond to this stimulus are therefore implicated in the pathogenesis and have utility in the design of therapeutic, prognostic and diagnostic products.

[0852] Clone p1H23 represents hypothetical protein FLJ21094. The protein sequence encoded by hypothetical protein FLJ21094 is represented in the public databases by the accession AAH14003 and is described in this patent by SEQ ID NO: 187. The nucleotide sequence is represented in the public sequence databases by the accession AK024747 and is described in this patent by SEQ ID NO: 188. Hypoxia is an important feature of several diseases, and genes that respond to this stimulus are therefore implicated in the pathogenesis and have utility in the design of therapeutic, prognostic and diagnostic products.

[0853] Clone p1H10 represents an unannotated EST. The protein sequence encoded by this EST is not represented in the public databases by a protein accession. The nucleotide sequence is represented in the public sequence databases by the accession AA909912 and is described in this patent by SEQ ID NO: 190. Hypoxia is an important feature of several diseases, and genes that respond to this stimulus are therefore implicated in the pathogenesis and have utility in the design of therapeutic, prognostic and diagnostic products.

[0854] Clone p1H6 represents an unannotated EST. The protein sequence encoded by this EST is not represented in the public databases by a protein accession. The nucleotide sequence is represented in the public sequence databases by the accession T99032 and is described in this patent by SEQ ID NO: 192. Hypoxia is an important feature of several diseases, and genes that respond to this stimulus are therefore implicated in the pathogenesis and have utility in the design of therapeutic, prognostic and diagnostic products. The EST represented by SEQ ID NO: 192 is induced in macrophages treated with the inhibitory cytokine IL-10. The EST represented by SEQ ID NO: 192 is repressed in macrophages activated by IL-15. We expect it to have an anti-inflammatory role.

[0855] Clone p1H13 represents an unannotated EST. The protein sequence encoded by this EST is not represented in the public databases by a protein accession. The nucleotide sequence is represented in the public sequence databases by the accession H52503 and is described in this patent by SEQ ID NO: 194. Hypoxia is an important feature of several diseases, and genes that respond to this stimulus are therefore implicated in the pathogenesis and have utility in the design of therapeutic, prognostic and diagnostic products. Macrophages are key to several diseases involving hypoxia, and contribute to inflammatory processes. In these, macrophages are frequently activated by cytokines, which have been shown to be present at disease sites, so gene expression responses to both hypoxia and cytokines are especially relevant. The EST represented by SEQ ID NO: 194 is repressed in macrophages activated by LPS and gamma interferon.

[0856] Clone p1H19 represents an unannotated EST. The protein sequence encoded by this EST is not represented in the public databases by a protein accession. The nucleotide sequence is represented in the public sequence databases by the accession AA127017 and is described in this patent by SEQ ID NO: 196. Hypoxia is an important feature of several diseases, and genes that respond to this stimulus are therefore implicated in the pathogenesis and have utility in the design of therapeutic, prognostic and diagnostic products. Hypoxia is frequently found in human tumours where macrophage infiltrates are also found. In a series of 5 patients with either ovarian or breast cancer, the EST represented by the SEQ ID NO: 196 is down-regulated in the malignant tissue as compared to adjacent normal tissue in at least one patient.

[0857] Clone p1G22 represents an unannotated EST. The protein sequence encoded by this EST is not represented in the public databases by a protein accession. The nucleotide sequence is represented in the public sequence databases by the accession R38647 and is described in this patent by SEQ ID NO: 198. Hypoxia is an important feature of several diseases, and genes that respond to this stimulus are therefore implicated in the pathogenesis and have utility in the design of therapeutic, prognostic and diagnostic products. Endothelial cells are key to angiogenesis, a process implicated in several diseases associated with hypoxia, including cancer and rheumatoid arthritis. The EST represented by SEQ ID NO: 198 is preferentially induced by hypoxia in endothelial cells. We expect this gene product to have a pro-angiogenic effect, and its inhibition to have an anti-angiogenic effect.

[0858] Clone p1G21 represents an unannotated EST. The protein sequence encoded by this EST is not represented in the public databases by a protein accession. The nucleotide sequence is represented in the public sequence databases by the accession T87233 and is described in this patent by SEQ ID NO: 200. Hypoxia is an important feature of several diseases, and genes that respond to this stimulus are therefore implicated in the pathogenesis and have utility in the design of therapeutic, prognostic and diagnostic products.

[0859] Clone p1H1 represents hypothetical protein FLJ10826. The protein sequence encoded by hypothetical protein FLJ10826 is represented in the public databases by the accession BAB14226 and is described in this patent by SEQ ID NO: 201. The nucleotide sequence is represented in the public sequence databases by the accession NM_{—}018233 and is described in this patent by SEQ ID NO: 202. Hypoxia is an important feature of several diseases, and genes that respond to this stimulus are therefore implicated in the pathogenesis and have utility in the design of therapeutic, prognostic and diagnostic products.

[0860] Clone p1G20 represents cDNA YO23H03. The protein sequence encoded by cDNA YO23H03 is not represented in the public databases by a protein accession. The nucleotide sequence is represented in the public sequence databases by the accession AF075053 and is described in this patent by SEQ ID NO: 204. Hypoxia is an important feature of several diseases, and genes that respond to this stimulus are therefore implicated in the pathogenesis and have utility in the design of therapeutic, prognostic and diagnostic products. Macrophages are key to several diseases involving hypoxia, and contribute to inflammatory processes. In these, macrophages are frequently activated by cytokines, which have been shown to be present at disease sites, so gene expression responses to both hypoxia and cytokines are especially relevant. The cDNA YO23H03 is repressed in macrophages activated by LPS and gamma interferon.

[0861] Clone p1H5 represents hypothetical protein FLJ22690. The protein sequence encoded by hypothetical protein FLJ22690 is represented in the public databases by the accession NP_{—}078987 and is described in this patent by SEQ ID NO: 205. The nucleotide sequence is represented in the public sequence databases by the accession NM_{—}024711 and is described in this patent by SEQ ID NO: 206. Hypoxia is an important feature of several diseases, and genes that respond to this stimulus are therefore implicated in the pathogenesis and have utility in,the design of therapeutic, prognostic and diagnostic products. Endothelial cells are key to angiogenesis, a process implicated in several diseases associated with hypoxia, including cancer and rheumatoid arthritis. Hypothetical protein FLJ22690 is preferentially induced by hypoxia in endothelial cells. We expect this gene product to have a pro-angiogenic effect, and its inhibition to have an anti-angiogenic effect. Macrophages are key to several diseases involving hypoxia, and contribute to inflammatory processes. In these, macrophages are frequently activated by cytokines, which have been shown to be present at disease sites, so gene expression responses to both hypoxia and cytokines are especially relevant. Hypothetical protein FLJ22690 is induced in macrophages activated by IL-15.

[0862] Clone p1G19 represents Mitochondrion sequence. The protein sequence encoded by Mitochondrion sequence is represented in the public databases by the accession AAH05845 and is described in this patent by SEQ ID NO: 207. The nucleotide sequence is represented in the public sequence databases by the accession BC005845 and is described in this patent by SEQ ID NO: 208. Hypoxia is an important feature of several diseases, and genes that respond to this stimulus are therefore implicated in the pathogenesis and have utility in the design of therapeutic, prognostic and diagnostic products. Hypoxia is frequently found in human tumours where macrophage infiltrates are also found. In a series of 5 patients with either ovarian or breast cancer, the Mitochondrion sequence represented by SEQ ID NO: 208 is down-regulated in the malignant tissue as compared to adjacent normal tissue in at least one patient.

[0863] Clone p1H2 represents Fatty acid binding protein 5. The protein sequence encoded by Fatty acid binding protein 5 is represented in the public databases by the accession NP_{—}001435 and is described in this patent by SEQ ID NO: 209. The nucleotide sequence is represented in the public sequence databases by the accession NM_{—}001444 and is described in this patent by SEQ ID NO: 210. Hypoxia is an important feature of several diseases, and genes that respond to this stimulus are therefore implicated in the pathogenesis and have utility in the design of therapeutic, prognostic and diagnostic products. There is a prejudice in the art that the response to hypoxia is generic to all cell types. Contrary to this, we show that genes are regulated by hypoxia to a greater degree in certain cell types, substantiating their utility in designing specific therapeutic products for diseases involving those cell types. Monocytes and macrophages have been implicated in the following diseases involving hypoxia: rheumatoid arthritis, atherosclerosis, cancer, COPD. Fatty acid binding protein 5 is preferentially induced by hypoxia in monocytes or macrophages. Crucially and very recently, Fatty acid binding protein 5 expressed in macrophages has been shown to play a very important role in the development of atherosclerotic plaques [Layne et al 2001, FASEB J 15:2733-5]. Our demonstration of hypoxic-regulation of this gene not only makes clear how this gene can participate in disease initiation and progression, but provides for a potential route to diagnosis and therapy of atherosclerosis. Macrophages are key to several diseases involving hypoxia, and contribute to inflammatory processes. In these, macrophages are frequently activated by cytokines, which have been shown to be present at disease sites, so gene expression responses to both hypoxia and cytokines are especially relevant. TNFalpha is an inflammatory cytokine, which acts on macrophages, and has been shown to be central to the pathophysiology and treatment of diseases including rheumatoid arthritis. Genes that change in expression in response to TNFalpha therefore have utility in the design of therapeutic, prognostic and diagnostic products for such inflammatory conditions. Fatty acid binding protein 5 is repressed in macrophages activated by TNFalpha.

[0864] Clone p1G18 represents Mitochondrion sequence. The protein sequence encoded by Mitochondrion sequence is not represented in the public databases by a protein accession. The nucleotide sequence is represented in the public sequence databases by the accession BC001612 and is described in this patent by SEQ ID NO: 212. Hypoxia is an important feature of several diseases, and genes that respond to this stimulus are therefore implicated in the pathogenesis and have utility in the design of therapeutic, prognostic and diagnostic products. Macrophages are key to several diseases involving hypoxia, and contribute to inflammatory processes. In these, macrophages are frequently activated by cytokines, which have been shown to be present at disease sites, so gene expression responses to both hypoxia and cytokines are especially relevant. The Mitochondrion sequence represented by SEQ ID NO: 212 is repressed in macrophages activated by LPS and gamma interferon.

[0865] Clone p1H4 represents an unannotated EST. The protein sequence encoded by this EST is not represented in the public databases by a protein accession. The nucleotide sequence is represented in the public sequence databases by the accession AA679939 and is described in this patent by SEQ ID NO: 214. Hypoxia is an important feature of several diseases, and genes that respond to this stimulus are therefore implicated in the pathogenesis and have utility in the design of therapeutic, prognostic and diagnostic products. Macrophages are key to several diseases involving hypoxia, and contribute to inflammatory processes. In these, macrophages are frequently activated by cytokines, which have been shown to be present at disease sites, so gene expression responses to both hypoxia and cytokines are especially relevant. The EST represented by SEQ ID NO: 214 is repressed in macrophages activated by IL-17. We expect it to have an anti-inflammatory role. Hypoxia is frequently found in human tumours where macrophage infiltrates are also found. In a series of 5 patients with either ovarian or breast cancer, the EST represented by the SEQ ID NO: 214 is down-regulated in the malignant tissue as compared to adjacent normal tissue in at least one patient.

[0866] Clone p1H3 represents an unannotated EST. The protein sequence encoded by this EST is not represented in the public databases by a protein accession. The nucleotide sequence is represented in the public sequence databases by the accession AA630167 and is described in this patent by SEQ ID NO: 216. Hypoxia is an important feature of several diseases, and genes that respond to this stimulus are therefore implicated in the pathogenesis and have utility in the design of therapeutic, prognostic and diagnostic products. Hypoxia is frequently found in human tumours where macrophage infiltrates are also found. In a series of 5 patients with either ovarian or breast cancer, the EST represented by SEQ ID NO: 216 is up-regulated and also down-regulated in the malignant tissue as compared to adjacent normal tissue in at least one patient.

[0867] The protein sequence encoded by BCL2/adenovirus E1B 19 kD-interacting protein 3-like is represented in the public databases by the accession NP_{—}004322 and is described in this patent by SEQ ID NO: 217. The nucleotide sequence is represented in the public sequence databases by the accession NM_{—}004331 and is described in this patent by SEQ ID NO: 218. Hypoxia is an important feature of several diseases, and genes that respond to this stimulus are therefore implicated in the pathogenesis and have utility in the design of therapeutic, prognostic and diagnostic products.

[0868] The protein sequence encoded by SLC2A1 is represented in the public databases by the accession NP_{—}006507 and is described in this patent by SEQ ID NO: 219. The nucleotide sequence is represented in the public sequence databases by the accession NM_{—}006516 and is described in this patent by SEQ ID NO: 220. SLC2A1 is a glucose transporter gene and is also known as GLUT1. Hypoxia is an important feature of several diseases, and genes that respond to this stimulus are therefore implicated in the pathogenesis and have utility in the design of therapeutic, prognostic and diagnostic products.

[0869] Clone p1P3 represents PDGFB. The protein sequence encoded by PDGFB is represented in the public databases by the accession NP_{—}148937 and is described in this patent by SEQ ID NO: 221. The nucleotide sequence is represented in the public sequence databases by the accession NM_{—}033016 and is described in this patent by SEQ ID NO: 222. Hypoxia is an important feature of several diseases, and genes that respond to this stimulus are therefore implicated in the pathogenesis and have utility in the design of therapeutic, prognostic and diagnostic products. Macrophages are key to several diseases involving hypoxia, and contribute to inflammatory processes. In these, macrophages are frequently activated by cytokines, which have been shown to be present at disease sites, so gene expression responses to both hypoxia and cytokines are especially relevant. PDGFB is induced in macrophages activated by LPS and gamma interferon.

[0870] Clones p1A8 and p1A9 represent Lactate dehydrogenase A. The protein sequence encoded by Lactate dehydrogenase A is represented in the public databases by the accession NP_{—}005557 and is described in this patent by SEQ ID NO: 223. The nucleotide sequence is represented in the public sequence databases by the accession NM_{—}005566 and is described in this patent by SEQ ID NO: 224. Hypoxia is an important feature of several diseases, and genes that respond to this stimulus are therefore implicated in the pathogenesis and have utility in the design of therapeutic, prognostic and diagnostic products. Macrophages are key to several diseases involving hypoxia, and contribute to inflammatory processes. In these, macrophages are frequently activated by cytokines, which have been shown to be present at disease sites, so gene expression responses to both hypoxia and cytokines are especially relevant. Lactate dehydrogenase A is repressed in macrophages activated by LPS and gamma interferon and is also repressed in macrophages activated by IL-15. TNFalpha is an inflammatory cytokine, which acts on macrophages, and has been shown to be central to the pathophysiology and treatment of diseases including rheumatoid arthritis. Genes that change in expression in response to TNFalpha therefore have utility in the design of therapeutic, prognostic and diagnostic products for such inflammatory conditions. Lactate dehydrogenase A is induced in macrophages activated by TNFalpha. Hypoxia is frequently found in human tumours where macrophage infiltrates are also found. In a series of 5 patients with either ovarian or breast cancer, Lactate dehydrogenase A is up-regulated in the malignant tissue as compared to adjacent normal tissue in at least one patient.

[0871] Clone p1B17 represents Tissue factor. The protein sequence encoded by Tissue factor is represented in the public databases by the accession NP_{—}001984 and is described in this patent by SEQ ID NO: 225. The nucleotide sequence is represented in the public sequence databases by the accession NM_{—}001993 and is described in this patent by SEQ ID NO: 226. Hypoxia is an important feature of several diseases, and genes that respond to this stimulus are therefore implicated in the pathogenesis and have utility in the design of therapeutic, prognostic and diagnostic products. Tissue factor is preferentially induced by hypoxia in mammary epithelial cells. Macrophages are key to several diseases involving hypoxia, and contribute to inflammatory processes. In these, macrophages are frequently activated by cytokines, which have been shown to be present at disease sites, so gene expression responses to both hypoxia and cytokines are especially relevant. TNFalpha is an inflammatory cytokine, which acts on macrophages, and has been shown to be central to the pathophysiology and treatment of diseases including rheumatoid arthritis. Cienes that change in expression in response to TNFalpha therefore have utility in the design of therapeutic, prognostic and diagnostic products for such inflammatory conditions. Tissue factor is induced in macrophages activated by TNFalpha. Tissue factor is the primary initiator of blood coagulation with structural homology to the cytokine receptor family, and has been implicated in various vascular processes including metastasis, angiogenesis, and atherosclerosis. Our demonstration of hypoxic regulation leads to a clear undertanding of the possibility of intervention in disease by modulation of Tissue factor activity.

[0872] Clone p1O20 represents VEGF. The protein sequence encoded by VEGF is represented in the public databases by the accession NP_{—}003367 and is described in this patent by SEQ ID NO: 227. The nucleotide sequence is represented in the public sequence databases by the accession NM_{—}003376 and is described in this patent by SEQ ID NO: 228. Hypoxia is an important feature of several diseases, and genes that respond to this stimulus are therefore implicated in the pathogenesis and have utility in the design of therapeutic, prognostic and diagnostic products. Hypoxia is frequently found in human tumours where macrophage infiltrates are also found. In a series of 5 patients with either ovarian or breast cancer, VEGF is up-regulated in the malignant tissue as compared to adjacent normal tissue in at least one patient.

[0873] Clone p1B2 represents N-myc downstream regulated. The protein sequence encoded by N-myc downstream regulated is represented in the public databases by the accession NP_{—}006087 and is described in this patent by SEQ ID NO: 229. The nucleotide sequence is represented in the public sequence databases by the accession NM_{—}006096 and is described in this patent by SEQ ID NO: 230. Hypoxia is an important feature of several diseases, and genes that respond to this stimulus are therefore implicated in the pathogenesis and have utility in the design of therapeutic, prognostic and diagnostic products. N-myc downstream regulated is preferentially induced by hypoxia in mammary epithelial cells.

[0874] Clone p1B3 represents Proline 4-hydroxylase, alpha polypeptide I. The protein sequence encoded by Proline 4-hydroxylase, alpha polypeptide I is represented in the public databases by the accession NP_{—}000908 and is described in this patent by SEQ ID NO: 231. The nucleotide sequence is represented in the public sequence databases by the accession NM_{—}000917 and is described in this patent by SEQ ID NO: 232. Hypoxia is an important feature of several diseases, and genes that respond to this stimulus are therefore implicated in the pathogenesis and have utility in the design of therapeutic, prognostic and diagnostic products. Macrophages are key to several diseases involving hypoxia, and contribute to inflammatory processes. In these, macrophages are frequently activated by cytokines, which have been shown to be present at disease sites, so gene expression responses to both hypoxia and cytokines are especially relevant. Proline 4-hydroxylase, alpha polypeptide I is repressed in macrophages activated by LPS and gamma interferon. Hypoxia is frequently found in human tumours where macrophage infiltrates are also found. In a series of 5 patients with either ovarian or breast cancer, Proline 4-hydroxylase, alpha polypeptide I is down-regulated in the malignant tissue as compared to adjacent normal tissue in at least one patient.

[0875] The protein sequence encoded by BCL2/adenovirus E1B-interacting protein 3 is represented in the public databases by the accession NP_{—}004043 and is described in this patent by SEQ ID NO: 233. The nucleotide sequence is represented in the public sequence databases by the accession NM_{—}004052 and is described in this patent by SEQ ID NO: 234. Hypoxia is an important feature of several diseases, and genes that respond to this stimulus are therefore implicated in the pathogenesis and have utility in the design of therapeutic, prognostic and diagnostic products.

[0876] Clones p1B18 and p1B19 represent Plasminogen activator inhibitor, type 1. The protein sequence encoded by Plasminogen activator inhibitor, type 1 is represented in the public databases by the accession NP_{—}000593 and is described in this patent by SEQ ID NO: 235. The nucleotide sequence is represented in the public sequence databases by the accession NM_{—}000602 and is described in this patent by SEQ ID NO: 236. Hypoxia is an important feature of several diseases, and genes that respond to this stimulus are therefore implicated in the pathogenesis and have utility in the design of therapeutic, prognostic and diagnostic products. Macrophages are key to several diseases involving hypoxia, and contribute to inflammatory processes. In these, macrophages are frequently activated by cytokines, which have been shown to be present at disease sites, so gene expression responses to both hypoxia and cytokines are especially relevant. Plasminogen activator inhibitor, type 1 is induced in macrophages activated by LPS and gamma interferon. Plasminogen activator inhibitor, type 1 is repressed in macrophages activated by IL-17. TNFalpha is an inflammatory cytokine, which acts on macrophages, and has been shown to be central to the pathophysiology and treatment of diseases including rheumatoid arthritis. Genes that change in expression in response to TNFalpha therefore have utility in the design of therapeutic, prognostic and diagnostic products for such inflammatory conditions. Plasminogen activator inhibitor, type 1 is induced in macrophages activated by TNFalpha. Hypoxia is frequently found in human tumours where macrophage infiltrates are also found. In a series of 5 patients with either ovarian or breast cancer, Plasminogen activator inhibitor, type 1 is down-regulated in the malignant tissue as compared to adjacent normal tissue in at least one patient.

[0877] Clone p1N17 represents COX-2. The protein sequence encoded by COX-2 is represented in the public databases by the accession NP_{—}000954 and is described in this patent by SEQ ID NO: 237. The nucleotide sequence is represented in the public sequence databases by the accession NM_{—}000963 and is described in this patent by SEQ ID NO: 238. Hypoxia is an important feature of several diseases, and genes that respond to this stimulus are therefore implicated in the pathogenesis and have utility in the design of therapeutic, prognostic and diagnostic products. COX-2 is preferentially induced by hypoxia in mammary epithelial cells. Macrophages are key to several diseases involving hypoxia, and contribute to inflammatory processes. In these, macrophages are frequently activated by cytokines, which have been shown to be present at disease sites, so gene expression responses to both hypoxia and cytokines are especially relevant. COX-2 is induced in macrophages activated by LPS and gamma interferon. TNFalpha is an inflammatory cytokine, which acts on macrophages, and has been shown to be central to the pathophysiology and treatment of diseases including rheumatoid arthritis. Genes that change in expression in response to TNFalpha therefore have utility in the design of therapeutic, prognostic and diagnostic products for such inflammatory conditions. COX-2 is induced in macrophages activated by TNFalpha. In view of the known role of COX-2 in prostaglandin synthesis and tumour progression, its induction by hypoxia has profound clinical implications, and clear utility in diagnosis and therapy. Hypoxia is frequently found in human tumours where macrophage infiltrates are also found.

[0878] Clone p1A24 represents Metallothionein 1H. The protein sequence encoded by Metallothionein 1H is represented in the public databases by the accession NP_{—}005942 and is described in this patent by SEQ ID NO: 239. The nucleotide sequence is represented in the public sequence databases by the accession NM_{—}005951 and is described in this patent by SEQ ID NO: 240. Metallothioneins can act as an antioxidant and free-radical scavenger and are therefore protective against cell death in hypoxia. Hypoxia is an important feature of several diseases, and genes that respond to this stimulus are therefore implicated in the pathogenesis and have utility in the design of therapeutic, prognostic and diagnostic products. Hepatocytes are the main cell type of the liver and genes which are induced in response to hypoxia in this cell type are relevant to development of diagnostics and therapeutics towards liver diseases involving hypoxia, including cirrhosis. Metallothionein 1H is preferentially induced by hypoxia in hepatocytes. Macrophages are key to several diseases involving hypoxia, and contribute to inflammatory processes. In these, macrophages are frequently activated by cytokines, which have been shown to be present at disease sites, so gene expression responses to both hypoxia and cytokines are especially relevant. Metallothionein 1H is induced in macrophages activated by LPS and gamma interferon.

[0879] The protein sequence encoded by Metallothionein 1L is represented in the public databases by the accession NP_{—}002441 and is described in this patent by SEQ ID NO: 241. The nucleotide sequence is represented in the public sequence databases by the accession NM_{—}002450 and is described in this patent by SEQ ID NO: 242. Metallothioneins can act as an antioxidant and free-radical scavenger and are therefore protective against cell death in hypoxia. Hypoxia is an important feature of several diseases, and genes that respond to this stimulus are therefore implicated in the pathogenesis and have utility in the design of therapeutic, prognostic and diagnostic products.

[0880] Clone p1B1 represents Metallothionein 1G. The protein sequence encoded by Metallothionein 1G is represented in the public databases by the accession NP_{—}005941 and is described in this patent by SEQ ID NO: 243. The nucleotide sequence is represented in the public sequence databases by the accession NM_{—}005950 and is described in this patent by SEQ ID NO: 244. Metallothioneins can act as an antioxidant and free-radical scavenger and are therefore protective against cell death in hypoxia. Hypoxia is an important feature of several diseases, and genes that respond to this stimulus are therefore implicated in the pathogenesis and have utility in the design of therapeutic, prognostic and diagnostic products. HIF1alpha and EPAS1 are transcription factors which mediate the response to hypoxia of several genes, and have them selves been implicated in specific diseases. By adenoviral over-expression of HIF1alpha we show augmentation of the hypoxic induction of certain genes, further confirming their status as responsive to hypoxia. Metallothionein 1G has been shown to be induced by hypoxia to a greater degree following adenoviral over-expression of HIF1alpha. Hepatocytes are the main cell type of the liver and genes which are induced in response to hypoxia in this cell type are relevant to development of diagnostics and therapeutics towards liver diseases involving hypoxia, including cirrhosis. Metallothionein 1G is preferentially induced by hypoxia in hepatocytes. Macrophages are key to several diseases involving hypoxia, and contribute to inflammatory processes. In these, macrophages are frequently activated by cytokines, which have been shown to be present at disease sites, so gene expression responses to both hypoxia and cytokines are especially relevant. Metallothionein 1G is induced in macrophages activated by LPS and gamma interferon. Hypoxia is frequently found in human tumours where macrophage infiltrates are also found. In a series of 5 patients with either ovarian or breast cancer, Metallothionein 1G is up-regulated in the malignant tissue as compared to adjacent normal tissue in at least one patient.

[0881] The protein sequence encoded by Metallothionein 1E (functional) is not represented in the public databases by a protein accession. The nucleotide sequence is represented in the public sequence databases by the accession AA872383 and is described in this patent by SEQ ID NO: 246. Metallothioneins can act as an antioxidant and free-radical scavenger and are therefore protective against cell death in hypoxia. Hypoxia is an important feature of several diseases, and genes that respond to this stimulus are therefore implicated in the pathogenesis and have utility in the design of therapeutic, prognostic and diagnostic products.

[0882] Clones p1A1, p1A2, p1A3 and p1A4 represent SLC2A3. The protein sequence encoded by SLC2A3 is represented in the public databases by the accession NP_{—}008862 and is described in this patent by SEQ ID NO: 247. The nucleotide sequence is represented in the public sequence databases by the accession NM_{—}006931 and is described in this patent by SEQ ID NO: 248. Hypoxia is an important feature of several diseases, and genes that respond to this stimulus are therefore implicated in the pathogenesis and have utility in the design of therapeutic, prognostic and diagnostic products. SLC2A3 is induced in macrophages treated with the inhibitory cytokine IL-10. TNFalpha is an inflammatory cytokine, which acts on macrophages, and has been shown to be central to the pathophysiology and treatment of diseases including rheumatoid arthritis. Genes that change in expression in response to TNFalpha therefore have utility in the design of therapeutic, prognostic and diagnostic products for such inflammatory conditions. SLC2A3 is induced in macrophages activated by TNFalpha.

[0883] Clones p1A15, p1A16, p1A17 and p1A18 represent Hexokinase-2. The protein sequence encoded by Hexokinase-2 is represented in the public databases by the accession NP_{—}000180 and is described in this patent by SEQ ID NO: 249. The nucleotide sequence is represented in the public sequence databases by the accession NM_{—}000189 and is described in this patent by SEQ ID NO: 250. Hypoxia is an important feature of several diseases, and genes that respond to this stimulus are therefore implicated in the pathogenesis and have utility in the design of therapeutic, prognostic and diagnostic products. Macrophages are key to several diseases involving hypoxia, and contribute to inflammatory processes. In these, macrophages are frequently activated by cytokines, which have been shown to be present at disease sites, so gene expression responses to both hypoxia and cytokines are especially relevant. Hexokinase-2 is repressed in macrophages activated by LPS and gamma interferon.

[0884] Clones p1B14, p1B15 and p1B16 represent Interleukin 8. The protein sequence encoded by Interleukin 8 is represented in the public databases by the accession NP_{—}000575 and is described in this patent by SEQ ID NO: 251. The nucleotide sequence is represented in the public sequence databases by the accession NM_{—}000584 and is described in this patent by SEQ ID NO: 252. Hypoxia is an important feature of several diseases, and genes that respond to this stimulus are therefore implicated in the pathogenesis and have utility in the design of therapeutic, prognostic and diagnostic products. Macrophages are key to several diseases involving hypoxia, and contribute to inflammatory processes. In these, macrophages are frequently activated by cytokines, which have been shown to be present at disease sites, so gene expression responses to both hypoxia and cytokines are especially relevant. Interleukin 8 is induced in macrophages activated by LPS and gamma interferon and is also induced in macrophages activated by IL-17. TNFalpha is an inflammatory cytokine, which acts on macrophages, and has been shown to be central to the pathophysiology and treatment of diseases including rheumatoid arthritis. Genes that change in expression in response to TNFalpha therefore have utility in the design of therapeutic, prognostic and diagnostic products for such inflammatory conditions. Interleukin 8 is induced in macrophages activated by TNFalpha. Hypoxia is frequently found in human tumours where macrophage infiltrates are also found. In a series of 5 patients with either ovarian or breast cancer, Interleukin 8 is down-regulated in the malignant tissue as compared to adjacent normal tissue in at least one patient.

[0885] Clones p1A11 and p1A12 represent GAPDH. The protein sequence encoded by GAPDH is represented in the public databases by the accession NP_{—}002037 and is described in this patent by SEQ ID NO: 253. The nucleotide sequence is represented in the public sequence databases by the accession NM_{—}002046 and is described in this patent by SEQ ID NO: 254. Hypoxia is an important feature of several diseases, and genes that respond to this stimulus are therefore implicated in the pathogenesis and have utility in the design of therapeutic, prognostic and diagnostic products. Macrophages are key to several diseases involving hypoxia, and contribute to inflammatory processes. In these, macrophages are frequently activated by cytokines, which have been shown to be present at disease sites, so gene expression responses to both hypoxia and cytokines are especially relevant. GAPDH is repressed in macrophages activated by LPS and gamma interferon and is also induced in macrophages activated by IL-17 or IL-15. TNFalpha is an inflammatory cytokine, which acts on macrophages, and has been shown to be central to the pathophysiology and treatment of diseases including rheumatoid arthritis. Genes that change in expression in response to TNFalpha therefore have utility in the design of therapeutic, prognostic and diagnostic products for such inflammatory conditions. GAPDH is induced in macrophages activated by TNFalpha. Hypoxia is frequently found in human tumours where macrophage infiltrates are also found. In a series of 5 patients with either ovarian or breast cancer, GAPDH is up-regulated in the malignant tissue as compared to adjacent normal tissue in at least one patient.

[0886] Clone p1A13 represents Phosphoglycerate kinase 1. The protein sequence encoded by Phosphoglycerate kinase 1 is represented in the public databases by the accession NP_{—}000282 and is described in this patent by SEQ ID NO: 255. The nucleotide sequence is represented in the public sequence databases by the accession NM_{—}000291 and is described in this patent by SEQ ID NO: 256. Hypoxia is an important feature of several diseases, and genes that respond to this stimulus are therefore implicated in the pathogenesis and have utility in the design of therapeutic, prognostic and diagnostic products. Macrophages are key to several diseases involving hypoxia, and contribute to inflammatory processes. In these, macrophages are frequently activated by cytokines, which have been shown to be present at disease sites, so gene expression responses to both hypoxia and cytokines are especially relevant. Phosphoglycerate kinase 1 is repressed in macrophages activated by LPS and gamma interferon. TNFalpha is an inflammatory cytokine, which acts on macrophages, and has been shown to be central to the pathophysiology and treatment of diseases including rheumatoid arthritis. Genes that change in expression in response to TNFalpha therefore have utility in the design of therapeutic, prognostic and diagnostic products for such inflammatory conditions. Phosphoglycerate kinase 1 is induced in macrophages activated by TNFalpha.

[0887] Clone p1A14 represents Enolase 1. The protein sequence encoded by Enolase 1 is represented in the public databases by the accession NP_{—}001419 and is described in this patent by SEQ ID NO: 257. The nucleotide sequence is represented in the public sequence databases by the accession NM_{—}001428 and is described in this patent by SEQ ID NO: 258. Hypoxia is an important feature of several diseases, and genes that respond to this stimulus are therefore implicated in the pathogenesis and have utility in the design of therapeutic, prognostic and diagnostic products. Macrophages are key to several diseases involving hypoxia, and contribute to inflammatory processes. In these, macrophages are frequently activated by cytokines, which have been shown to be present at disease sites, so gene expression responses to both hypoxia and cytokines are especially relevant. Enolase 1 is repressed in macrophages activated by LPS and gamma interferon. TNFalpha is an inflammatory cytokine, which acts on macrophages, and has been shown to be central to the pathophysiology and treatment of diseases including rheumatoid arthritis. Genes that change in expression in response to TNFalpha therefore have utility in the design of therapeutic, prognostic and diagnostic products for such inflammatory conditions. Enolase 1 is induced in macrophages activated by TNFalpha. Hypoxia is frequently found in human tumours where macrophage infiltrates are also found. In a series of 5 patients with either ovarian or breast cancer, Enolase 1 is up-regulated in the malignant tissue as compared to adjacent normal tissue in at least one patient.

[0888] Clone p1A19 represents Aldolase C. The protein sequence encoded by Aldolase C is represented in the public databases by the accession NP_{—}005156 and is described in this patent by SEQ ID NO: 259. The nucleotide sequence is represented in the public sequence databases by the accession NM_{—}005165 and is described in this patent by SEQ ID NO: 260. Hypoxia is an important feature of several diseases, and genes that respond to this stimulus are therefore implicated in the pathogenesis and have utility in the design of therapeutic, prognostic and diagnostic products. Macrophages are key to several diseases involving hypoxia, and contribute to inflammatory processes. In these, macrophages are frequently activated by cytokines, which have been shown to be present at disease sites, so gene expression responses to both hypoxia and cytokines are especially relevant. Aldolase C is induced in macrophages activated by IL-15. Aldolase C is repressed in macrophages activated by IL-15. TNFalpha is an inflammatory cytokine, which acts on macrophages, and has been shown to be central to the pathophysiology and treatment of diseases including rheumatoid arthritis. Genes that change in expression in response to TNFalpha therefore have utility in the design of therapeutic, prognostic and diagnostic products for such inflammatory conditions. Aldolase C is induced in macrophages activated by TNFalpha. Hypoxia is frequently found in human tumours where macrophage infiltrates are also found. In a series of 5 patients with either ovarian or breast cancer, Aldolase is up-regulated in the malignant tissue as compared to adjacent normal tissue in at least one patient.

[0889] Clone p1A20 represents Triosephosphate isomerase 1. The protein sequence encoded by Triosephosphate isomerase 1 is represented in the public databases by the accession NP_{—}000356 and is described in this patent by SEQ ID NO: 261. The nucleotide sequence is represented in the public sequence databases by the accession NM_{—}000365 and is described in this patent by SEQ ID NO: 262. Hypoxia is an important feature of several diseases, and genes that respond to this stimulus are therefore implicated in the pathogenesis and have utility in the design of therapeutic, prognostic and diagnostic products. Macrophages are key to several diseases involving hypoxia, and contribute to inflammatory processes. In these, macrophages are frequently activated by cytokines, which have been shown to be present at disease sites, so gene expression responses to both hypoxia and cytokines are especially relevant. Triosephosphate isomerase 1 is repressed in macrophages activated by LPS and gamma interferon and is also repressed in macrophages activated by IL-15. TNFalpha is an inflammatory cytokine, which acts on macrophages, and has been shown to be central to the pathophysiology and treatment of diseases including rheumatoid arthritis. Genes that change in expression in response to TNFalpha therefore have utility in the design of therapeutic, prognostic and diagnostic products for such inflammatory conditions. Triosephosphate isomerase 1 is induced in macrophages activated by TNFalpha.

[0890] Clone p1A23 represents Metallothionein 2A. The protein sequence encoded by Metallothionein 2A is represented in the public databases by the accession NP_{—}005944 and is described in this patent by SEQ ID NO: 265. The nucleotide sequence is represented in the public sequence databases by the accession NM_{—}005953 and is described in this patent by SEQ ID NO: 266. Metallothioneins can act as an antioxidant and free-radical scavenger and are therefore protective against cell death in hypoxia. Hypoxia is an important feature of several diseases, and genes that respond to this stimulus are therefore implicated in the pathogenesis and have utility in the design of therapeutic, prognostic and diagnostic products. HIF1alpha and EPAS1 are transcription factors which mediate the response to hypoxia of several genes, and have them selves been implicated in specific diseases. By adenoviral over-expression of HIF1alpha we show augmentation of the hypoxic induction of certain genes, further confirming their status as responsive to hypoxia. Metallothionein 2A has been shown to be induced by hypoxia to a greater degree following adenoviral over-expression of HIF1alpha. Hepatocytes are the main cell type of the liver and genes which are induced in response to hypoxia in this cell type are relevant to development of diagnostics and therapeutics towards liver diseases involving hypoxia, including cirrhosis. Metallothionein 2A is preferentially induced by hypoxia in hepatocytes. Macrophages are key to several diseases involving hypoxia, and contribute to inflammatory processes. In these, macrophages are frequently activated by cytokines, which have been shown to be present at disease sites, so gene expression responses to both hypoxia and cytokines are especially relevant. Metallothionein 2A is induced in macrophages activated by LPS and gamma interferon and also induced in macrophages activated by IL-15. Hypoxia is frequently found in human tumours where macrophage infiltrates are also found. In a series of 5 patients with either ovarian or breast cancer, Metallothionein 2A is down-regulated in the malignant tissue as compared to adjacent normal tissue in at least one patient.

[0891] Clones p1B20 and p1B21 represent Osteopontin. The protein sequence encoded by Osteopontin is represented in the public databases by the accession NP_{—}000573 and is described in this patent by SEQ ID NO: 267. The nucleotide sequence is represented in the public sequence databases by the accession NM_{—}000582 and is described in this patent by SEQ ID NO: 268. Hypoxia is an important feature of several diseases, and genes that respond to this stimulus are therefore implicated in the pathogenesis and have utility in the design of therapeutic, prognostic and diagnostic products. There is a prejudice in the art that the response to hypoxia is generic to all cell types. Contrary to this, we show that genes are regulated by hypoxia to a greater degree in certain cell types, substantiating their utility in designing specific therapeutic products for diseases involving those cell types. Monocytes and macrophages have been implicated in the following diseases involving hypoxia: rheumatoid arthritis, atherosclerosis, cancer, COPD. Osteopontin is preferentially induced by hypoxia in monocytes or macrophages and a restricted number of other cell types. Osteopontin has been shown recently to play a role in autoimmune disease [Chabas et al, 2001, Science 294: 1731-5]. We present a new association between the hypoxic response and autoimmune disease. Macrophages are key to several diseases involving hypoxia, and contribute to inflammatory processes. In these, macrophages are frequently activated by cytokines, which have been shown to be present at disease sites, so gene expression responses to both hypoxia and cytokines are especially relevant. Osteopontin is repressed in macrophages activated by LPS and gamma interferon. Hypoxia is frequently found in human tumours where macrophage infiltrates are also found. In a series of 5 patients with either ovarian or breast cancer, Osteopontin is up-regulated in the malignant tissue as compared to adjacent normal tissue in at least one patient.

[0892] Clones p1C17 and p1C18 represent Granulin. The protein sequence encoded by Granulin is represented in the public databases by the accession NP_{—}002078 and is described in this patent by SEQ ID NO: 269. The nucleotide sequence is represented in the public sequence databases by the accession NM_{—}002087 and is described in this patent by SEQ ID NO: 270. Hypoxia is an important feature of several diseases, and genes that respond to this stimulus are therefore implicated in the pathogenesis and have utility in the design of therapeutic, prognostic and diagnostic products. Macrophages are key to several diseases involving hypoxia, and contribute to inflammatory processes. In these, macrophages are frequently activated by cytokines, which have been shown to be present at disease sites, so gene expression responses to both hypoxia and cytokines are especially relevant. Granulin is repressed in macrophages activated by LPS and gamma interferon. Hypoxia is frequently found in human tumours where macrophage infiltrates are also found. In a series of 5 patients with either ovarian or breast cancer, Granulin is up-regulated in the malignant tissue as compared to adjacent normal tissue in at least one patient. The up-regulation of Granulin, which is a known growth factor, is a clinically significant feature of the hypoxic response with clear diagnostic and therapeutic utility.

[0893] Clone p1D8 represents Hypoxia-inducible protein 2. The protein sequence encoded by Hypoxia-inducible protein 2 is represented in the public databases by the accession NP_{—}037464 and is described in this patent by SEQ ID NO: 271. The nucleotide sequence is represented in the public sequence databases by the accession NM_{—}013332 and is described in this patent by SEQ ID NO: 272. Hypoxia is an important feature of several diseases, and genes that respond to this stimulus are therefore implicated in the pathogenesis and have utility in the design of therapeutic, prognostic and diagnostic products. Hypoxia-inducible protein 2 is induced in macrophages treated with the inhibitory cytokine IL-10. Hypoxia-inducible protein 2 is repressed in macrophages activated by IL-17 and is also repressed in macrophages activated by IL-15.

[0894] Clone p1A10 represents Enolase 2. The protein sequence encoded by Enolase 2 is represented in the public databases by the accession NP_{—}001966 and is described in this patent by SEQ ID NO: 273. The nucleotide sequence is represented in the public sequence databases by the accession NM_{—}001975 and is described in this patent by SEQ ID NO: 274. Hypoxia is an important feature of several diseases, and genes that respond to this stimulus are therefore implicated in the pathogenesis and have utility in the design of therapeutic, prognostic and diagnostic products. Macrophages are key to several diseases involving hypoxia, and contribute to inflammatory processes. In these, macrophages are frequently activated by cytokines, which have been shown to be present at disease sites, so gene expression responses to both hypoxia and cytokines are especially relevant. Enolase 2 is repressed in macrophages activated by LPS and gamma interferon. Hypoxia is frequently found in human tumours where macrophage infiltrates are also found. In a series of 5 patients with either ovarian or breast cancer, Enolase 2 is up-regulated in the malignant tissue as compared to adjacent normal tissue in at least one patient. We expect it to have an anti-inflammatory role.

[0895] Clone p1G24 represents Glycogen synthase 1. The protein sequence encoded by Glycogen synthase 1 is represented in the public databases by the accession NP_{—}002094 and is described in this patent by SEQ ID NO: 275. The nucleotide sequence is represented in the public sequence databases by the accession NM_{—}002103 and is described in this patent by SEQ ID NO: 276. Hypoxia is an important feature of several diseases, and genes that respond to this stimulus are therefore implicated in the pathogenesis and have utility in the design of therapeutic, prognostic and diagnostic products. Macrophages are key to several diseases involving hypoxia, and contribute to inflammatory processes. In these, macrophages are frequently activated by cytokines, which have been shown to be present at disease sites, so gene expression responses to both hypoxia and cytokines are especially relevant. Glycogen synthase 1 is repressed in macrophages activated by IL-17 and is also repressed in macrophages activated by IL-15.

[0896] Clone p1G23 represents ALCAM. The protein sequence encoded by ALCAM is represented in the public databases by the accession NP_{—}001618 and is described in this patent by SEQ ID NO: 277. The nucleotide sequence is represented in the public sequence databases by the accession NM_{—}001627 and is described in this patent by SEQ ID NO: 278. Hypoxia is an important feature of several diseases, and genes that respond to this stimulus are therefore implicated in the pathogenesis and have utility in the design of therapeutic, prognostic and diagnostic products. In view of the recently-discovered role of ALCAM in angiogenesis [Ohneda et al, 2001, Blood 2001 October 1;98(7):2134-42], our demonstration of hypoxic regulation of ALCAM has great clinical significance in the treatment and diagnosis of vascular disease and cancer.

[0897] Clone p1G7 represents an unannotated EST. The protein sequence encoded by this EST is not represented in the public databases by a protein accession. The nucleotide sequence is represented in the public sequence databases by the accession BC008022 and is described in this patent by SEQ ID NO: 282. Hypoxia is an important feature of several diseases, and genes that respond to this stimulus are therefore implicated in the pathogenesis and have utility in the design of therapeutic, prognostic and diagnostic products. Macrophages are key to several diseases involving hypoxia, and contribute to inflammatory processes. In these, macrophages are frequently activated by cytokines, which have been shown to be present at disease sites, so gene expression responses to both hypoxia and cytokines are especially relevant. The EST represented by SEQ ID NO: 282 is repressed in macrophages activated by LPS and gamma interferon. We expect the product of EST represented by SEQ ID NO: 282 to have an anti-inflammatory role.

[0898] Clone p2A23 represents Chitinase 3-like 2. The protein sequence encoded by Chitinase 3-like 2 is represented in the public databases by the accession NP_{—}003991 and is described in this patent by SEQ ID NO: 283. The nucleotide sequence is represented in the public sequence databases by the accession NM_{—}004000 and is described in this patent by SEQ ID NO: 284. Hypoxia is an important feature of several diseases, and genes that respond to this stimulus are therefore implicated in the pathogenesis and have utility in the design of therapeutic, prognostic and diagnostic products. Hypoxia is frequently found in human tumours where macrophage infiltrates are also found. In a series of 5 patients with either ovarian or breast cancer, Chitinase 3-like 2 is down-regulated in the malignant tissue as compared to adjacent normal tissue in at least one patient.

[0899] Clone p1G1 represents BACH1. The protein sequence encoded by BACH1 is represented in the public databases by the accession NP_{—}001177 and is described in this patent by SEQ ID NO: 285. The nucleotide sequence is represented in the public sequence databases by the accession NM_{—}001186 and is described in this patent by SEQ ID NO: 286. BACH1, a novel helicase-like protein, interacts directly with BRCA1 and contributes to its DNA repair function. Hypoxia is an important feature of several diseases, and genes that respond to this stimulus are therefore implicated in the pathogenesis and have utility in the design of therapeutic, prognostic and diagnostic products. The induction by hypoxia of this known transcriptional repressor and potential oncogene [Cantor et al 2001, Cell 105:149-60] is a very significant finding with profound implications for the diagnosis and treatment of cancer.

[0900] Clone p1G15 represents Phosphoglucomutase 1. The protein sequence encoded by Phosphoglucomutase 1 is represented in the public databases by the accession NP_{—}002624 and is described in this patent by SEQ ID NO: 287. The nucleotide sequence is represented in the public sequence databases by the accession NM_{—}002633 and is described in this patent by SEQ ID NO: 288. Hypoxia is an important feature of several diseases, and genes that respond to this stimulus are therefore implicated in the pathogenesis and have utility in the design of therapeutic, prognostic and diagnostic products. Phosphoglucomutase 1 is induced in macrophages treated with the inhibitory cytokine IL-10.

[0901] Clone p1F23 represents hypothetical protein LOC51014. The protein sequence encoded by hypothetical protein LOC51014 is represented in the public databases by the accession Q9Y3B3 and is described in this patent by SEQ ID NO: 289. The nucleotide sequence is represented in the public sequence databases by the accession AF151867 and is described in this patent by SEQ ID NO: 290. Hypoxia is an important feature of several diseases, and genes that respond to this stimulus are therefore implicated in the pathogenesis and have utility in the design of therapeutic, prognostic and diagnostic products. Hypoxia is frequently found in human tumours where macrophage infiltrates are also found. In a series of 5 patients with either ovarian or breast cancer, hypothetical protein LOC51014 is down-regulated in the malignant tissue as compared to adjacent normal tissue in at least one patient.

[0902] Clone p1G8 represents Sin3-associated polypeptide. The protein sequence encoded by Sin3-associated polypeptide is represented in the public databases by the accession NP_{—}003855 and is described in this patent by SEQ ID NO: 291. The nucleotide sequence is represented in the public sequence databases by the accession NM_{—}003864 and is described in this patent by SEQ ID NO: 292. Hypoxia is an important feature of several diseases, and genes that respond to this stimulus are therefore implicated in the pathogenesis and have utility in the design of therapeutic, prognostic and diagnostic products.

[0903] Clone p1G13 represents ABCA1. The protein sequence encoded by ABCA1 is represented in the public databases by the accession NP_{—}005493 and is described in this patent by SEQ ID NO: 293. The nucleotide sequence is represented in the public sequence databases by the accession NM_{—}005502 and is described in this patent by SEQ ID NO: 294. Hypoxia is an important feature of several diseases, and genes that respond to this stimulus are therefore implicated in the pathogenesis and have utility in the design of therapeutic, prognostic and diagnostic products. Macrophages are key to several diseases involving hypoxia, and contribute to inflammatory processes. In these, macrophages are frequently activated by cytokines, which have been shown to be present at disease sites, so gene expression responses to both hypoxia and cytokines are especially relevant. ABCA1 is repressed in macrophages activated by LPS and gamma interferon. The hypoxia induction of ABCA1, which is known to be relevant to atherosclerosis [Kielar et al 2001, Clin Chem 47:2089-97], has profound implications for the diagnosis and treatment of this disease.

[0904] Clone p1G10 represents SEC24 member A. The protein sequence encoded by SEC24 member A is represented in the public databases by the accession CAA10334 and is described in this patent by SEQ ID NO: 295. The nucleotide sequence is represented in the public sequence databases by the accession AJ131244 and is described in this patent by SEQ ID NO: 296. Hypoxia is an important feature of several diseases, and genes that respond to this stimulus are therefore implicated in the pathogenesis and have utility in the design of therapeutic, prognostic and diagnostic products.

[0905] Clone p1F24 represents Glia-derived nexin. The protein sequence encoded by Glia-derived nexin is represented in the public databases by the accession AAA35883 and is described in this patent by SEQ ID NO: 297. The nucleotide sequence is represented in the public sequence databases by the accession M17783 and is described in this patent by SEQ ID NO: 298. Glia-derived nexin is a glycoprotein that functions as a serine protease inhibitor with activity towards thrombin, trypsin and urokinase. It is known to play a role in neuro-degeneration [Seidel et al 1998, Brain Res Mol Brain Res 60:296-300]. Thus the hypoxia induction of this gene is highly significant for the diagnosis and treatment of neuro-degenerative disease. Hypoxia is an important feature of several diseases, and genes that respond to this stimulus are therefore implicated in the pathogenesis and have utility in the design of therapeutic, prognostic and diagnostic products. Macrophages are key to several diseases involving hypoxia, and contribute to inflammatory processes. In these, macrophages are frequently activated by cytokines, which have been shown to be present at disease sites, so gene expression responses to both hypoxia and cytokines are especially relevant. Glia-derived nexin is induced in macrophages activated by LPS and gamma interferon. Hypoxia is frequently found in human tumours where macrophage infiltrates are also found. In a series of 5 patients with either ovarian or breast cancer, Glia-derived nexin is down-regulated in the malignant tissue as compared to adjacent normal tissue in at least one patient.

[0906] Clone p1G2 represents Postsynaptic density-95. The protein sequence encoded by Postsynaptic density-95 is represented in the public databases by the accession NP_{—}001356 and is described in this patent by SEQ ID NO: 299. The nucleotide sequence is represented in the public sequence databases by the accession NM_{—}001365 and is described in this patent by SEQ ID NO: 300. Postsynaptic density-95 belongs to the MAGUK family of cell junction proteins. Hypoxia is an important feature of several diseases, and genes that respond to this stimulus are therefore implicated in the pathogenesis and have utility in the design of therapeutic, prognostic and diagnostic products. The recent demonstration for a possible role for Postsynaptic density-95 in ischaemic pre-conditioning [Tauskela et al 2001, Neuroscience 107:571-584] underlines the medical significance of our determination of the hypoxic regulation of this gene, and its utility in the diagnosis and treatment of ischaemic disease.

[0907] Clone p1G11 represents Tumour protein D52. The protein sequence encoded by Tumour protein D52 is represented in the public databases by the accession NP_{—}005070 and is described in this patent by SEQ ID NO: 301. The nucleotide sequence is represented in the public sequence databases by the accession NM_{—}005079 and is described in this patent by SEQ ID NO: 302. Hypoxia is an important feature of several diseases, and genes that respond to this stimulus are therefore implicated in the pathogenesis and have utility in the design of therapeutic, prognostic and diagnostic products. The response of renal epithelial cells to hypoxia is pertinent to kidney failure, especially regarding the medullary tissue. Tumour protein D52 is preferentially induced by hypoxia in renal epithelial cells. Hypoxia is frequently found in human tumours where macrophage infiltrates are also found. In a series of 5 patients with either ovarian or breast cancer, Tumour protein D52 is up-regulated in the malignant tissue as compared to adjacent normal tissue in at least one patient. Our observation of hypoxia-regulation of this tumour-associated protein is highly significant for the diagnosis and treatment of cancer.

[0908] Clone p1G16 represents p27, Kip1. The protein sequence encoded by p27, Kip1is represented in the public databases by the accession NP_{—}004055 and is described in this patent by SEQ ID NO: 303. The nucleotide sequence is represented in the public sequence databases by the accession NM_{—}004064 and is described in this patent by SEQ ID NO: 304. Hypoxia is an important feature of several diseases, and genes that respond to this stimulus are therefore implicated in the pathogenesis and have utility in the design of therapeutic, prognostic and diagnostic products. The hypoxia regulation of this anti-mitogen has important utility in oncology and angiogenesis [Fouty et al 2001, Am J Respir Cell Mol Biol 25:652-658].

[0909] Clone p1G9 represents PI-3-kinase, catalytic, beta polypeptide. The protein sequence encoded by PI-3-kinase, catalytic, beta polypeptide is represented in the public databases by the accession NP_{—}006210 and is described in this patent by SEQ ID NO: 305. The nucleotide sequence is represented in the public sequence databases by the accession NM_{—}006219 and is described in this patent by SEQ ID NO: 306. Hypoxia is an important feature of several diseases, and genes that respond to this stimulus are therefore implicated in the pathogenesis and have utility in the design of therapeutic, prognostic and diagnostic products. Macrophages are key to several diseases involving hypoxia, and contribute to inflammatory processes. In these, macrophages are frequently activated by cytokines, which have been shown to be present at disease sites, so gene expression responses to both hypoxia and cytokines are especially relevant. PI-3-kinase, catalytic, beta polypeptide is repressed in macrophages activated by LPS and gamma interferon. The very recent publication of a role for PI3 kinase in angiogenesis induced by hypoxic pre-conditioning [Zhu et al 2001, FEBS Lett 508:369-74] re-enforces the clinical utility which we claim for this gene as a result of its hypoxia-induction.

[0910] Clone p1G4 represents SLC5A3. The protein sequence encoded by SLC5A3 is represented in the public databases by the accession AAC39548 and is described in this patent by SEQ ID NO: 307. The nucleotide sequence is represented in the public sequence databases by the accession AF027153 and is described in this patent by SEQ ID NO: 308. Hypoxia is an important feature of several diseases, and genes that respond to this stimulus are therefore implicated in the pathogenesis and have utility in the design of therapeutic, prognostic and diagnostic products. SLC5A3 is over-expressed in the brains of children with Downs Syndrome, and may play a role in brain pathology [Berry et al 1999, J Pediatr 135:94-7]. Thus our claims of clinical utility following from hypoxia induction have great medical significance for the diagnosis and treatment of ischaemic and degenerative disease. Macrophages are key to several diseases involving hypoxia, and contribute to inflammatory processes. In these, macrophages are frequently activated by cytokines, which have been shown to be present at disease sites, so gene expression responses to both hypoxia and cytokines are especially relevant. SLC5A3 is repressed in macrophages activated by LPS and gamma interferon.

[0911] Clone p1G14 represents Cytohesin binding protein. The protein sequence encoded by Cytohesin binding protein is represented in the public databases by the accession NP_{—}004279 and is described in this patent by SEQ ID NO: 309. The nucleotide sequence is represented in the public sequence databases by the accession NM_{—}004288 and is described in this patent by SEQ ID NO: 310. Hypoxia is an important feature of several diseases, and genes that respond to this stimulus are therefore implicated in the pathogenesis and have utility in the design of therapeutic, prognostic and diagnostic products. Cytohesin has been shown to modulate PI3-kinase activity [Dierks et al 2001, J Biol Chem 276:37472-81], re-enforcing our claim here and elsewhere in this filing of the relevance to the hypoxic response of pathways controlled by the critical second-messenger PI3.

[0912] Clones p1A5 and p1A6 represent SLC2A5. The protein sequence encoded by SLC2A5 is represented in the public databases by the accession NP_{—}003030 and is described in this patent by SEQ ID NO: 311. The nucleotide sequence is represented in the public sequence databases by the accession NM_{—}003039 and is described in this patent by SEQ ID NO: 312. Hypoxia is an important feature of several diseases, and genes that respond to this stimulus are therefore implicated in the pathogenesis and have utility in the design of therapeutic, prognostic and diagnostic products. Macrophages are key to several diseases involving hypoxia, and contribute to inflammatory processes. In these, macrophages are frequently activated by cytokines, which have been shown to be present at disease sites, so gene expression responses to both hypoxia and cytokines are especially relevant. SLC2A5 is repressed in macrophages activated by LPS and gamma interferon. Hypoxia is frequently found in human tumours where macrophage infiltrates are also found. In a series of 5 patients with either ovarian or breast cancer, SLC2A5 is up-regulated in the malignant tissue as compared to adjacent normal tissue in at least one patient.

[0913] Clones p1B6, p1B7, p1B8 and p1B9 represent Adipophilin. The protein sequence encoded by Adipophilin is represented in the public databases by the accession NP_{—}001113 and is described in this patent by SEQ ID NO: 313. The nucleotide sequence is represented in the public sequence databases by the accession NM_{—}001122 and is described in this patent by SEQ ID NO: 314. Hypoxia is an important feature of several diseases, and genes that respond to this stimulus are therefore implicated in the pathogenesis and have utility in the design of therapeutic, prognostic and diagnostic products. There is a prejudice in the art that the response to hypoxia is generic to all cell types. Contrary to this, we show that genes are regulated by hypoxia to a greater degree in certain cell types, substantiating their utility in designing specific therapeutic products for diseases involving those cell types. Monocytes and macrophages have been implicated in the following diseases involving hypoxia: rheumatoid arthritis, atherosclerosis, cancer, COPD. The hypoxia induction of adipophilin has profound implications for the causation, diagnosis and treatment of atherosclerosis, because this protein plays a key role in the uptake of lipid and foam cell formation [Buechler et al 2001, Biochim Biophys Acta 1532:97-104]. Adipophilin is preferentially induced by hypoxia in monocytes or macrophages and a restricted number of other cell types. Macrophages are key to several diseases involving hypoxia, and contribute to inflammatory processes. In these, macrophages are frequently activated by cytokines, which have been shown to be present at disease sites, so gene expression responses to both hypoxia and cytokines are especially relevant. Adipophilin is repressed in macrophages activated by LPS and gamma interferon and is also repressed in macrophages activated by IL-15. TNFalpha is an inflammatory cytokine, which acts on macrophages, and has been shown to be central to the pathophysiology and treatment of diseases including rheumatoid arthritis. Genes that change in expression in response to TNFalpha therefore have utility in the design of therapeutic, prognostic and diagnostic products for such inflammatory conditions. Adipophilin is induced in macrophages activated by TNFalpha. Hypoxia is frequently found in human tumours where macrophage infiltrates are also found. In a series of 5 patients with either ovarian or breast cancer, Adipophilin is up-regulated and also down-regulated in the malignant tissue as compared to adjacent normal tissue in at least one patient.

[0914] Clone p1G17 represents early development regulator 2. The protein sequence encoded by early development regulator 2 is represented in the public databases by the accession NP_{—}004418 and is described in this patent by SEQ ID NO: 315. The nucleotide sequence is represented in the public sequence databases by the accession NM_{—}004427 and is described in this patent by SEQ ID NO: 316. Hypoxia is an important feature of several diseases, and genes that respond to this stimulus are therefore implicated in the pathogenesis and have utility in the design of therapeutic, prognostic and diagnostic products. Macrophages are key to several diseases involving hypoxia, and contribute to inflammatory processes. In these, macrophages are frequently activated by cytokines, which have been shown to be present at disease sites, so gene expression responses to both hypoxia and cytokines are especially relevant. Early development regulator 2 is repressed in macrophages activated by LPS and gamma interferon.

[0915] Clone p1G3 represents B-cell translocation gene 1. The protein sequence encoded by B-cell translocation gene 1 is represented in the public databases by the accession NP_{—}001722 and is described in this patent by SEQ ID NO: 317. The nucleotide sequence is represented in the public sequence databases by the accession NM_{—}001731 and is described in this patent by SEQ ID NO: 318. Hypoxia is an important feature of several diseases, and genes that respond to this stimulus are therefore implicated in the pathogenesis and have utility in the design of therapeutic, prognostic and diagnostic products. Macrophages are key to several diseases involving hypoxia, and contribute to inflammatory processes. In these, macrophages are frequently activated by cytokines, which have been shown to be present at disease sites, so gene expression responses to both hypoxia and cytokines are especially relevant. B-cell translocation gene 1 is induced in macrophages activated by LPS and gamma interferon. Hypoxia is frequently found in human tumours where macrophage infiltrates are also found. In a series of 5 patients with either ovarian or breast cancer, B-cell translocation gene 1 is down-regulated in the malignant tissue as compared to adjacent normal tissue in at least one patient.

[0916] Clone p1F22 represents Sorting nexin 9. The protein sequence encoded by Sorting nexin 9 is represented in the public databases by the accession NP_{—}057308 and is described in this patent by SEQ ID NO: 319. The nucleotide sequence is represented in the public sequence databases by the accession NM_{—}016224 and is described in this patent by SEQ ID NO: 320. Hypoxia is an important feature of several diseases, and genes that respond to this stimulus are therefore implicated in the pathogenesis and have utility in the design of therapeutic, prognostic and diagnostic products. Macrophages are key to several diseases involving hypoxia, and contribute to inflammatory processes. In these, macrophages are frequently activated by cytokines, which have been shown to be present at disease sites, so gene expression responses to both hypoxia and cytokines are especially relevant. TNFalpha is an inflammatory cytokine, which acts on macrophages, and has been shown to be central to the pathophysiology and treatment of diseases including rheumatoid arthritis. Genes that change in expression in response to TNFalpha therefore have utility in the design of therapeutic, prognostic and diagnostic products for such inflammatory conditions. Sorting nexin 9 is induced in macrophages activated by TNFalpha.

[0917] Clone p1G12 represents Cyclin G2. The protein sequence encoded by Cyclin G2 is represented in the public databases by the accession NP_{—}004345 and is described in this patent by SEQ ID NO: 321. The nucleotide sequence is represented in the public sequence databases by the accession NM_{—}004354 and is described in this patent by SEQ ID NO: 322. Hypoxia is an important feature of several diseases, and genes that respond to this stimulus are therefore implicated in the pathogenesis and have utility in the design of therapeutic, prognostic and diagnostic products. Macrophages are key to several diseases involving hypoxia, and contribute to inflammatory processes. In these, macrophages are frequently activated by cytokines, which have been shown to be present at disease sites, so gene expression responses to both hypoxia and cytokines are especially relevant. Cyclin G2 is repressed in macrophages activated by LPS and gamma interferon.

[0918] Clone p1F11 represents hypothetical protein LOC51754. The protein sequence encoded by hypothetical protein LOC51754 is represented in the public databases by the accession XP_{—}049657 and is described in this patent by SEQ ID NO: 323. The nucleotide sequence is represented in the public sequence databases by the accession AL137430 and is described in this patent by SEQ ID NO: 324. Hypoxia is an important feature of several diseases, and genes that respond to this stimulus are therefore implicated in the pathogenesis and have utility in the design of therapeutic, prognostic and diagnostic products. Macrophages are key to several diseases involving hypoxia, and contribute to inflammatory processes. In these, macrophages are frequently activated by cytokines, which have been shown to be present at disease sites, so gene expression responses to both hypoxia and cytokines are especially relevant. Hypothetical protein LOC51754 is repressed in macrophages activated by LPS and gamma interferon. Hypoxia is frequently found in human tumours where macrophage infiltrates are also found. In a series of 5 patients with either ovarian or breast cancer, hypothetical protein LOC51754 is up-regulated in the malignant tissue as compared to adjacent normal tissue in at least one patient.

[0919] Clone p1F14 represents Butyrate response factor 1. The protein sequence encoded by Butyrate response factor 1 is represented in the public databases by the accession NP_{—}004917 and is described in this patent by SEQ ID NO: 327. The nucleotide sequence is represented in the public sequence databases by the accession NM_{—}004926 and is described in this patent by SEQ ID NO: 328. Hypoxia is an important feature of several diseases, and genes that respond to this stimulus are therefore implicated in the pathogenesis and have utility in the design of therapeutic, prognostic and diagnostic products. HIF1alpha and EPAS1 are transcription factors which mediate the response to hypoxia of several genes, and have them selves been implicated in specific diseases. By adenoviral over-expression of EPAS1 we show augmentation of the hypoxic induction of certain genes, further confirming their status as responsive to hypoxia. Butyrate response factor 1 has been shown to be induced by hypoxia to a greater degree following adenoviral over-expression of EPAS 1. Hypoxia is frequently found in human tumours where macrophage infiltrates are also found. In a series of 5 patients with either ovarian or breast cancer, Butyrate response factor 1 is down-regulated in the malignant tissue as compared to adjacent normal tissue in at least one patient.

[0920] Clone p1F17 represents P8 protein (candidate of metastasis 1). The protein sequence encoded by P8 protein (candidate of metastasis 1) is represented in the public databases by the accession NP_{—}036517 and is described in this patent by SEQ ID NO: 329. The nucleotide sequence is represented in the public sequence databases by the accession NM_{—}012385 and is described in this patent by SEQ ID NO: 330. Hypoxia is an important feature of several diseases, and genes that respond to this stimulus are therefore implicated in the pathogenesis and have utility in the design of therapeutic, prognostic and diagnostic products. Macrophages are key to several diseases involving hypoxia, and contribute to inflammatory processes. In these, macrophages are frequently activated by cytokines, which have been shown to be present at disease sites, so gene expression responses to both hypoxia and cytokines are especially relevant. P8 protein (candidate of metastasis 1) is induced in macrophages activated by LPS and gamma interferon. Hypoxia is frequently found in human tumours where macrophage infiltrates are also found. In a series of 5 patients with either ovarian or breast cancer, P8 protein (candidate of metastasis 1) is up-regulated and also down-regulated in the malignant tissue as compared to adjacent normal tissue in at least one patient.

[0921] Clones p1C1 and p1C2 represent CXCR4. The protein sequence encoded by CXCR4 is represented in the public databases by the accession NP_{—}003458 and is described in this patent by SEQ ID NO: 331. The nucleotide sequence is represented in the public sequence databases by the accession NM_{—}003467 and is described in this patent by SEQ ID NO: 332. Hypoxia is an important feature of several diseases, and genes that respond to this stimulus are therefore implicated in the pathogenesis and have utility in the design of therapeutic, prognostic and diagnostic products. Macrophages are key to several diseases involving hypoxia, and contribute to inflammatory processes. In these, macrophages are frequently activated by cytokines, which have been shown to be present at disease sites, so gene expression responses to both hypoxia and cytokines are especially relevant. CXCR4 is repressed in macrophages activated by LPS and gamma interferon. TNFalpha is an inflammatory cytokine, which acts on macrophages, and has been shown to be central to the pathophysiology and treatment of diseases including rheumatoid arthritis. Genes that change in expression in response to TNFalpha therefore have utility in the design of therapeutic, prognostic and diagnostic products for such inflammatory conditions. CXCR4 is induced in macrophages activated by TNFalpha. CXCR4 may act through the PI3-K pathway. Hypoxia is frequently found in human tumours where macrophage infiltrates are also found. In a series of 5 patients with either ovarian or breast cancer, CXCR4 is up-regulated and also down-regulated in the malignant tissue as compared to adjacent normal tissue in at least one patient.

[0922] Clone p1F3 represents hypothetical protein XP_{—}017131. The protein sequence encoded by hypothetical protein XP_{—}017131 is represented in the public databases by the accession XP_{—}017131 and is described in this patent by SEQ ID NO: 333. The nucleotide sequence is represented in the public sequence databases by the accession XM_{—}017131 and is described in this patent by SEQ ID NO: 334. Hypoxia is an important feature of several diseases, and genes that respond to this stimulus are therefore implicated in the pathogenesis and have utility in the design of therapeutic, prognostic and diagnostic products. Macrophages are key to several diseases involving hypoxia, and contribute to inflammatory processes. In these, macrophages are frequently activated by cytokines, which have been shown to be present at disease sites, so gene expression responses to both hypoxia and cytokines are especially relevant. Hypothetical protein XP_{—}017131 is repressed in macrophages activated by LPS and gamma interferon. Hypoxia is frequently found in human tumours where macrophage infiltrates are also found. In a series of 5 patients with either ovarian or breast cancer, hypothetical protein XP_{—}017131 is down-regulated in the malignant tissue as compared to adjacent normal tissue in at least one patient.

[0923] Clone p1F20 represents Proline-rich protein with nuclear targeting signal. The protein sequence encoded by Proline-rich protein with nuclear targeting signal is represented in the public databases by the accession NP_{—}006804 and is described in this patent by SEQ ID NO: 335. The nucleotide sequence is represented in the public sequence databases by the accession NM_{—}006813 and is described in this patent by SEQ ID NO: 336. Hypoxia is an important feature of several diseases, and genes that respond to this stimulus are therefore implicated in the pathogenesis and have utility in the design of therapeutic, prognostic and diagnostic products. Macrophages are key to several diseases involving hypoxia, and contribute to inflammatory processes. In these, macrophages are frequently activated by cytokines, which have been shown to be present at disease sites, so gene expression responses to both hypoxia and cytokines are especially relevant. TNFalpha is an inflammatory cytokine, which acts on macrophages, and has been shown to be central to the pathophysiology and treatment of diseases including rheumatoid arthritis. Genes that change in expression in response to TNFalpha therefore have utility in the design of therapeutic, prognostic and diagnostic products for such inflammatory conditions. Proline-rich protein with nuclear targeting signal is induced in macrophages activated by TNFalpha. Hypoxia is frequently found in human tumours where macrophage infiltrates are also found. In a series of 5 patients with either ovarian or breast cancer, Proline-rich protein with nuclear targeting signal is down-regulated in the malignant tissue as compared to adjacent normal tissue in at least one patient.

[0924] Clone p1F6 represents hypothetical protein hqp0376. The protein sequence encoded by hypothetical protein hqp0376 is represented in the public databases by the accession T08745 and is described in this patent by SEQ ID NO: 337. The nucleotide sequence is represented in the public sequence databases by the accession AF078844 and is described in this patent by SEQ ID NO: 338. Hypothetical protein hqp0376 is a putative dead box protein as it shows high structural similarity to dead box proteins and yeast initiation factor 4A. Hypoxia is an important feature of several diseases, and genes that respond to this stimulus are therefore implicated in the pathogenesis and have utility in the design of therapeutic, prognostic and diagnostic products. HIF1alpha and EPAS1 are transcription factors which mediate the response to hypoxia of several genes, and have them selves been implicated in specific diseases. By adenoviral over-expression of HIF1alpha we show augmentation of the hypoxic induction of certain genes, further confirming their status as responsive to hypoxia. Hypothetical protein hqp0376 has been shown to be induced by hypoxia to a greater degree following adenoviral over-expression of HIF1alpha. Hepatocytes are the main cell type of the liver and genes which are induced in response to hypoxia in this cell type are relevant to development of diagnostics and therapeutics towards liver diseases involving hypoxia, including cirrhosis. Hypothetical protein hqp0376 is preferentially induced by hypoxia in hepatocytes. Macrophages are key to several diseases involving hypoxia, and contribute to inflammatory processes. In these, macrophages are frequently activated by cytokines, which have been shown to be present at disease sites, so gene expression responses to both hypoxia and cytokines are especially relevant. Hypothetical protein hqp0376 is induced in macrophages activated by LPS and gamma interferon.

[0925] Clone p1F4 represents CYP1. The protein sequence encoded by CYP1 is represented in the public databases by the accession NP_{—}000776 and is described in this patent by SEQ ID NO: 339. The nucleotide sequence is represented in the public sequence databases by the accession NM_{—}000785 and is described in this patent by SEQ ID NO: 340. Hypoxia is an important feature of several diseases, and genes that respond to this stimulus are therefore implicated in the pathogenesis and have utility in the design of therapeutic, prognostic and diagnostic products. There is a prejudice in the art that the response to hypoxia is generic to all cell types. Contrary to this, we show that genes are regulated by hypoxia to a greater degree in certain cell types, substantiating their utility in designing specific therapeutic products for diseases involving those cell types. Monocytes and macrophages have been implicated in the following diseases involving hypoxia: rheumatoid arthritis, atherosclerosis, cancer, COPD. CYP1 is preferentially induced by hypoxia in monocytes or macrophages. Macrophages are key to several diseases involving hypoxia, and contribute to inflammatory processes. In these, macrophages are frequently activated by cytokines, which have been shown to be present at disease sites, so gene expression responses to both hypoxia and cytokines are especially relevant. CYP1 is induced in macrophages activated by LPS and gamma interferon. TNFalpha is an inflammatory cytokine, which acts on macrophages, and has been shown to be central to the pathophysiology and treatment of diseases including rheumatoid arthritis. Genes that change in expression in response to TNFalpha therefore have utility in the design of therapeutic, prognostic and diagnostic products for such inflammatory conditions. CYP1 is induced in macrophages activated by TNFalpha.

[0926] Clone p1F15 represents SHB adaptor protein. The protein sequence encoded by SHB adaptor protein is represented in the public databases by the accession NP_{—}003019 and is described in this patent by SEQ ID NO: 341. The nucleotide sequence is represented in the public sequence databases by the accession NM_{—}003028 and is described in this patent by SEQ ID NO: 342. Hypoxia is an important feature of several diseases, and genes that respond to this stimulus are therefore implicated in the pathogenesis and have utility in the design of therapeutic, prognostic and diagnostic products. SHB adaptor protein participates in tyrosine kinase-mediated signalling and the regulation of angiogenesis and apotosis [Dixelius J. 2000, Blood 95:3403-11]. Our surprising observation of the hypoxia regulation of this protein has clear medical utility in the diagnosis and treatment of vascular disease and cancer. Macrophages are key to several diseases involving hypoxia, and contribute to inflammatory processes. In these, macrophages are frequently activated by cytokines, which have been shown to be present at disease sites, so gene expression responses to both hypoxia and cytokines are especially relevant. SHB adaptor protein is repressed in macrophages activated by LPS and gamma interferon.

[0927] Clone p1F13 represents Papillomavirus regulatory factor PRF-1. The protein sequence encoded by Papillomavirus regulatory factor PRF-1 is represented in the public databases by the accession NP_{—}061130 and is described in this patent by SEQ ID NO: 343. The nucleotide sequence is represented in the public sequence databases by the accession AK023418 and is described in this patent by SEQ ID NO: 344. Hypoxia is an important feature of several diseases, and genes that respond to this stimulus are therefore implicated in the pathogenesis and have utility in the design of therapeutic, prognostic and diagnostic products. Macrophages are key to several diseases involving hypoxia, and contribute to inflammatory processes. In these, macrophages are frequently activated by cytokines, which have been shown to be present at disease sites, so gene expression responses to both hypoxia and cytokines are especially relevant. Papillomavirus regulatory factor PRF-1 is repressed in macrophages activated by LPS and gamma interferon.

[0928] Clone p1A7 represents SLC31A2. The protein sequence encoded by SLC31A2 is represented in the public databases by the accession NP_{—}001851 and is described in this patent by SEQ ID NO: 345. The nucleotide sequence is represented in the public sequence databases by the accession NM_{—}001860 and is described in this patent by SEQ ID NO: 346. Hypoxia is an important feature of several diseases, and genes that respond to this stimulus are therefore implicated in the pathogenesis and have utility in the design of therapeutic, prognostic and diagnostic products. Macrophages are key to several diseases involving hypoxia, and contribute to inflammatory processes. In these, macrophages are frequently activated by cytokines, which have been shown to be present at disease sites, so gene expression responses to both hypoxia and cytokines are especially relevant. SLC31A2 is induced in macrophages activated by LPS and gamma interferon.

[0929] Clone p1A21 represents UDP-glucose pyrophosphorylase 2. The protein sequence encoded by UDP-glucose pyrophosphorylase 2 is represented in the public databases by the accession NP_{—}006750 and is described in this patent by SEQ ID NO: 347. The nucleotide sequence is represented in the public sequence databases by the accession NM_{—}006759 and is described in this patent by SEQ ID NO: 348. Hypoxia is an important feature of several diseases, and genes that respond to this stimulus are therefore implicated in the pathogenesis and have utility in the design of therapeutic, prognostic and diagnostic products.

[0930] Clones p1B4 and p1B5 represent Proline 4-hydroxylase, alpha polypeptide II. The protein sequence encoded by Proline 4-hydroxylase, alpha polypeptide II is represented in the public databases by the accession NP_{—}004190 and is described in this patent by SEQ ID NO: 349. The nucleotide sequence is represented in the public sequence databases by the accession NM_{—}004199 and is described in this patent by SEQ ID NO: 350. Hypoxia is an important feature of several diseases, and genes that respond to this stimulus are therefore implicated in the pathogenesis and have utility in the design of therapeutic, prognostic and diagnostic products. Macrophages are key to several diseases involving hypoxia, and contribute to inflammatory processes. In these, macrophages are frequently activated by cytokines, which have been shown to be present at disease sites, so gene expression responses to both hypoxia and cytokines are especially relevant. Proline 4-hydroxylase, alpha polypeptide II is repressed in macrophages activated by LPS and gamma interferon and is also repressed in macrophages activated by IL-15. TNFalpha is an inflammatory cytokine, which acts on macrophages, and has been shown to be central to the pathophysiology and treatment of diseases including rheumatoid arthritis. Genes that change in expression in response to TNFalpha therefore have utility in the design of therapeutic, prognostic and diagnostic products for such inflammatory conditions. Proline 4-hydroxylase, alpha polypeptide II is induced in macrophages activated by TNFalpha. Hypoxia is frequently found in human tumours where macrophage infiltrates are also found. In a series of 5 patients with either ovarian or breast cancer, Proline 4-hydroxylase, alpha polypeptide II is up-regulated in the malignant tissue as compared to adjacent normal tissue in at least one patient.

[0931] Clones p1B10, p1B11 and p1B12 represent Stearoyl-CoA desaturase. The protein sequence encoded by Stearoyl-CoA desaturase is represented in the public databases by the accession NP_{—}005054 and is described in this patent by SEQ ID NO: 351. The nucleotide sequence is represented in the public sequence databases by the accession NM_{—}005063 and is described in this patent by SEQ ID NO: 352. Hypoxia is an important feature of several diseases, and genes that respond to this stimulus are therefore implicated in the pathogenesis and have utility in the design of therapeutic, prognostic and diagnostic products. Macrophages are key to several diseases involving hypoxia, and contribute to inflammatory processes. In these, macrophages are frequently activated by cytokines, which have been shown to be present at disease sites, so gene expression responses to both hypoxia and cytokines are especially relevant. TNFalpha is an inflammatory cytokine, which acts on macrophages, and has been shown to be central to the pathophysiology and treatment of diseases including rheumatoid arthritis. Genes that change in expression in response to TNFalpha therefore have utility in the design of therapeutic, prognostic and diagnostic products for such inflammatory conditions. Stearoyl-CoA desaturase is induced in macrophages activated by TNFalpha.

[0932] Clone p1B13 represents Diacylglycerol kinase, zeta. The protein sequence encoded by Diacylglycerol kinase, zeta is represented in the public databases by the accession NP_{—}003637 and is described in this patent by SEQ ID NO: 353. The nucleotide sequence is represented in the public sequence databases by the accession NM_{—}003646 and is described in this patent by SEQ ID NO: 354. Hypoxia is an important feature of several diseases, and genes that respond to this stimulus are therefore implicated in the pathogenesis and have utility in the design of therapeutic, prognostic and diagnostic products.

[0933] Clone p1B22 represents Protease, serine, 11. The protein sequence encoded by Protease, serine, 11 is represented in the public databases by the accession NP_{—}002766 and is described in this patent by SEQ ID NO: 355. The nucleotide sequence is represented in the public sequence databases by the accession NM_{—}002775 and is described in this patent by SEQ ID NO: 356. Hypoxia is an important feature of several diseases, and genes that respond to this stimulus are therefore implicated in the pathogenesis and have utility in the design of therapeutic, prognostic and diagnostic products. Macrophages are key to several diseases involving hypoxia, and contribute to inflammatory processes. In these, macrophages are frequently activated by cytokines, which have been shown to be present at disease sites, so gene expression responses to both hypoxia and cytokines are especially relevant. Protease, serine, 11 is repressed in macrophages activated by LPS and gamma interferon. Hypoxia is frequently found in human tumours where macrophage infiltrates are also found. In a series of 5 patients with either ovarian or breast cancer, Protease, serine, 11 is down-regulated in the malignant tissue as compared to adjacent normal tissue in at least one patient.

[0934] Clone p1B23 represents Interleukin 1 receptor antagonist. The protein sequence encoded by Interleukin 1 receptor antagonist is represented in the public databases by the accession NP_{—}000568 and is described in this patent by SEQ ID NO: 357. The nucleotide sequence is represented in the public sequence databases by the accession NM_{—}000577 and is described in this patent by SEQ ID NO: 358. Hypoxia is an important feature of several diseases, and genes that respond to this stimulus are therefore implicated in the pathogenesis and have utility in the design of therapeutic, prognostic and diagnostic products. There is a prejudice in the art that the response to hypoxia is generic to all cell types. Contrary to this, we show that genes are regulated by hypoxia to a greater degree in certain cell types, substantiating their utility in designing specific therapeutic products for diseases involving those cell types. Monocytes and macrophages have been implicated in the following diseases involving hypoxia: rheumatoid arthritis, atherosclerosis, cancer, COPD. Interleukin 1 receptor antagonist is preferentially induced by hypoxia in monocytes or macrophages. TNFalpha is an inflammatory cytokine, which acts on macrophages, and has been shown to be central to the pathophysiology and treatment of diseases including rheumatoid arthritis. Genes that change in expression in response to TNFalpha therefore have utility in the design of therapeutic, prognostic and diagnostic products for such inflamnmatory conditions. Interleukin 1 receptor antagonist is induced in macrophages activated by TNFalpha.

[0935] Clone p1B24 represents NS1-binding protein. The protein sequence encoded by NS1-binding protein is represented in the public databases by the accession NP_{—}006460 and is described in this patent by SEQ ID NO: 359. The nucleotide sequence is represented in the public sequence databases by the accession NM_{—}006469 and is described in this patent by SEQ ID NO: 360. Hypoxia is an important feature of several diseases, and genes that respond to this stimulus are therefore implicated in the pathogenesis and have utility in the design of therapeutic, prognostic and diagnostic products.

[0936] Clone p1C3 represents Activin A receptor, type I. The protein sequence encoded by Activin A receptor, type I is represented in the public databases by the accession NP_{—}001096 and is described in this patent by SEQ ID NO: 361. The nucleotide sequence is represented in the public sequence databases by the accession NM_{—}001105 and is described in this patent by SEQ ID NO: 362. Hypoxia is an important feature of several diseases, and genes that respond to this stimulus are therefore implicated in the pathogenesis and have utility in the design of therapeutic, prognostic and diagnostic products. Activin A is known to induce apoptosis [Hughes et al 1999, Prog Neurobiol 57:421-50], and so the regulation of its receptor by hypoxia has clear clinical significance. Hypoxia is frequently found in human tumours where macrophage infiltrates are also found. In a series of 5 patients with either ovarian or breast cancer, Activin A receptor, type I is down-regulated in the malignant tissue as compared to adjacent normal tissue in at least one patient.

[0937] Clone p1C4 represents FGF receptor activating protein 1. The protein sequence encoded by FGF receptor activating protein 1 is represented in the public databases by the accession NP_{—}055304 and is described in this patent by SEQ ID NO: 363. The nucleotide sequence is represented in the public sequence databases by the accession NM_{—}014489 and is described in this patent by SEQ ID NO: 364. Hypoxia is an important feature of several diseases, and genes that respond to this stimulus are therefore implicated in the pathogenesis and have utility in the design of therapeutic, prognostic and diagnostic products. FGF has been shown to enhance survival of cardiac cells after ischaemic insult [Sheikh et al 2001, Am J Physiol Heart Circ Physiol 280:H1039-50], and so our observation of the hypoxia-regulation of the FGF receptor activating protein 1 is highly significant for the diagnosis and treatment of ischaemic disease. FGF receptor activating protein 1 is induced in macrophages treated with the inhibitory cytokine IL-10. Hypoxia is frequently found in human tumours where macrophage infiltrates are also found. In a series of 5 patients with either ovarian or breast cancer, FGF receptor activating protein 1 is up-regulated in the malignant tissue as compared to adjacent normal tissue in at least one patient.

[0938] Clone p1C5 represents Galectin 8. The protein sequence encoded by Galectin 8 is represented in the public databases by the accession NP_{—}006490 and is described in this patent by SEQ ID NO: 365. The nucleotide sequence is represented in the public sequence databases by the accession NM_{—}006499 and is described in this patent by SEQ ID NO: 366. Hypoxia is an important feature of several diseases, and genes that respond to this stimulus are therefore implicated in the pathogenesis and have utility in the design of therapeutic, prognostic and diagnostic products. Galectin 8 is an important tumour marker [for review see Bidon et al 2001, Int J Mol Med 8:245-50], and so its hypoxia-regulation is highly significant clinically.

[0939] Clone p1C6 represents Glucose phosphate isomerase. The protein sequence encoded by Glucose phosphate isomerase is represented in the public databases by the accession NP_{—}000166 and is described in this patent by SEQ ID NO: 367. The nucleotide sequence is represented in the public sequence databases by the accession NM_{—}000175 and is described in this patent by SEQ ID NO: 368. Hypoxia is an important feature of several diseases, and genes that respond to this stimulus are therefore implicated in the pathogenesis and have utility in the design of therapeutic, prognostic and diagnostic products. Macrophages are key to several diseases involving hypoxia, and contribute to inflammatory processes. In these, macrophages are frequently activated by cytokines, which have been shown to be present at disease sites, so gene expression responses to both hypoxia and cytokines are especially relevant. Glucose phosphate isomerase is induced in macrophages activated by IL-17 and also induced in macrophages activated by IL-15. TNFalpha is an inflammatory cytokine, which acts on macrophages, and has been shown to be central to the pathophysiology and treatment of diseases including rheumatoid arthritis. Genes that change in expression in response to TNFalpha therefore have utility in the design of therapeutic, prognostic and diagnostic products for such inflammatory conditions. Glucose phosphate isomerase is induced in macrophages activated by TNFalpha. Hypoxia is frequently found in human tumours where macrophage infiltrates are also found. In a series of 5 patients with either ovarian or breast cancer, Glucose phosphate isomerase is up-regulated in the malignant tissue as compared to adjacent normal tissue in at least one patient.

[0940] Clone p1C7 represents D123. The protein sequence encoded by D123 is represented in the public databases by the accession NP_{—}006014 and is described in this patent by SEQ ID NO: 369. The nucleotide sequence is represented in the public sequence databases by the accession NM_{—}006023 and is described in this patent by SEQ ID NO: 370. Hypoxia is an important feature of several diseases, and genes that respond to this stimulus are therefore implicated in the pathogenesis and have utility in the design of therapeutic, prognostic and diagnostic products. Macrophages are key to several diseases involving hypoxia, and contribute to inflammatory processes. In these, macrophages are frequently activated by cytokines, which have been shown to be present at disease sites, so gene expression responses to both hypoxia and cytokines are especially relevant. D123 is repressed in macrophages activated by LPS and gamma interferon and is also repressed in macrophages activated by IL-15. D123 protein is an important regulator of the cell cycle [Onisto et al 1998, Exp Cell Res 242:451-9]. Recently it has been shown to be regulated by modification and turnover [Okuda et al 2001, Cell Struct Funct 26:205-14]. We have shown the hypoxia-regulation of this protein, and also of several prolyl hydroxylases which are known to target proteins for ubiquitination and proteasomal degradation. We believe that concerted hypoxic control of D123 and its regulating prolyl hydroxylase is part of the means of hypoxic regulation of cell growth and tissue re-modelling.

[0941] Clone p1C8 represents DEC-1. The protein sequence encoded by DEC-1 is represented in the public databases by the accession NP_{—}003661 and is described in this patent by SEQ ID NO: 371. The nucleotide sequence is represented in the public sequence databases by the accession NM_{—}003670 and is described in this patent by SEQ ID NO: 372. Hypoxia is an important feature of several diseases, and genes that respond to this stimulus are therefore implicated in the pathogenesis and have utility in the design of therapeutic, prognostic and diagnostic products. DEC-1 is a helix-loop-helix transcription factor, and its hypoxia-regulation is highly significant. The response of renal epithelial cells to hypoxia is pertinent to kidney failure, especially regarding the medullary tissue. DEC-1 is preferentially induced by hypoxia in renal epithelial cells. Hypoxia is frequently found in human tumours where macrophage infiltrates are also found. In a series of 5 patients with either ovarian or breast cancer, DEC-1 is up-regulated and also down-regulated in the malignant tissue as compared to adjacent normal tissue in at least one patient.

[0942] Clone p1C9 represents RAB-8b protein. The protein sequence encoded by RAB-8b protein is represented in the public databases by the accession NP_{—}057614 and is described in this patent by SEQ ID NO: 373. The nucleotide sequence is represented in the public sequence databases by the accession NM_{—}016530 and is described in this patent by SEQ ID NO: 374. Hypoxia is an important feature of several diseases, and genes that respond to this stimulus are therefore implicated in the pathogenesis and have utility in the design of therapeutic, prognostic and diagnostic products. The hypoxia regulation of this small GTP-ase, which is involved in intracellular membrane trafficking, is highly significant. Macrophages are key to several diseases involving hypoxia, and contribute to inflammatory processes. In these, macrophages are frequently activated by cytokines, which have been shown to be present at disease sites, so gene expression responses to both hypoxia and cytokines are especially relevant. RAB-8b protein is induced in macrophages activated by LPS and gamma interferon.

[0943] Clone p1C10 represents Regulator of G-protein signalling 1. The protein sequence encoded by Regulator of G-protein signalling 1 is represented in the public databases by the accession NP_{—}002913 and is described in this patent by SEQ ID NO: 375. The nucleotide sequence is represented in the public sequence databases by the accession NM_{—}002922 and is described in this patent by SEQ ID NO: 376. Hypoxia is an important feature of several diseases, and genes that respond to this stimulus are therefore implicated in the pathogenesis and have utility in the design of therapeutic, prognostic and diagnostic products. There is a prejudice in the art that the response to hypoxia is generic to all cell types. Contrary to this, we show that genes are regulated by hypoxia to a greater degree in certain cell types, substantiating their utility in designing specific therapeutic products for diseases involving those cell types. Monocytes and macrophages have been implicated in the following diseases involving hypoxia: rheumatoid arthritis, atherosclerosis, cancer, COPD. Regulator of G-protein signalling 1 is preferentially induced by hypoxia in monocytes or macrophages. Macrophages are key to several diseases involving hypoxia, and contribute to inflammatory processes. In these, macrophages are frequently activated by cytokines, which have been shown to be present at disease sites, so gene expression responses to both hypoxia and cytokines are especially relevant. Regulator of G-protein signalling 1 is repressed in macrophages activated by LPS and gamma interferon. Hypoxia is frequently found in human tumours where macrophage infiltrates are also found. In a series of 5 patients with either ovarian or breast cancer, Regulator of G-protein signalling 1 is down-regulated in the malignant tissue as compared to adjacent normal tissue in at least one patient.

[0944] Clone p1C11 represents Polyubiquitin. The protein sequence encoded by Polyubiquitin is represented in the public databases by the accession BAA23632 and is described in this patent by SEQ ID NO: 377. The nucleotide sequence is represented in the public sequence databases by the accession AB009010 and is described in this patent by SEQ ID NO: 378. Hypoxia is an important feature of several diseases, and genes that respond to this stimulus are therefore implicated in the pathogenesis and have utility in the design of therapeutic, prognostic and diagnostic products. Macrophages are key to several diseases involving hypoxia, and contribute to inflammatory processes. In these, macrophages are frequently activated by cytokines, which have been shown to be present at disease sites, so gene expression responses to both hypoxia and cytokines are especially relevant. Polyubiquitin is repressed in macrophages activated by LPS and gamma interferon. TNFalpha is an inflammatory cytokine, which acts on macrophages, and has been shown to be central to the pathophysiology and treatment of diseases including rheumatoid arthritis. Genes that change in expression in response to TNFalpha therefore have utility in the design of therapeutic, prognostic and diagnostic products for such inflammatory conditions. Polyubiquitin is induced in macrophages activated by TNFalpha. Hypoxia is frequently found in human tumours where macrophage infiltrates are also found. In a series of 5 patients with either ovarian or breast cancer, Polyubiquitin is up-regulated in the malignant tissue as compared to adjacent normal tissue in at least one patient.

[0945] Clone p1C12 represents Integrin, alpha 5. The protein sequence encoded by Integrin, alpha 5 is represented in the public databases by the accession NP_{—}002196 and is described in this patent by SEQ ID NO: 379. The nucleotide sequence is represented in the public sequence databases by the accession NM_{—}002205 and is described in this patent by SEQ ID NO: 380. Hypoxia is an important feature of several diseases, and genes that respond to this stimulus are therefore implicated in the pathogenesis and have utility in the design of therapeutic, prognostic and diagnostic products. Integrin, alpha 5 may play a role in the response to neuronal injury [King et al 2001, J Neurocytol 30:243-52]. Our observation of hypoxia regulation of both COX-2 and integrin, alpha 5 supports the very recent suggestion that they may both function in recovery from cardiovascular injury [Hein et al 2001, Am J Physiol Heart Circ Physiol 281:H2378-84], which is pre-figured by our claims. Integrin, alpha 5 is induced by hypoxia in mammary epithelial cells, and may play an important role in cancer progression in that tissue through its function of regulating interaction with the extracellular matrix.

[0946] Clone p1C13 represents Jk-recombination signal binding protein. The protein sequence encoded by Jk-recombination signal binding protein is represented in the public databases by the accession AAA60258 and is described in this patent by SEQ ID NO: 381. The nucleotide sequence is represented in the public sequence databases by the accession L07872 and is described in this patent by SEQ ID NO: 382. Hypoxia is an important feature of several diseases, and genes that respond to this stimulus are therefore implicated in the pathogenesis and have utility in the design of therapeutic, prognostic and diagnostic products. Macrophages are key to several diseases involving hypoxia, and contribute to inflammatory processes. In these, macrophages are frequently activated by cytokines, which have been shown to be present at disease sites, so gene expression responses to both hypoxia and cytokines are especially relevant. Jk-recombination signal binding protein is repressed in macrophages activated by LPS and gamma interferon. TNFalpha is an inflammatory cytokine, which acts on macrophages, and has been shown to be central to the pathophysiology and treatment of diseases including rheumatoid arthritis. Genes that change in expression in response to TNFalpha therefore have utility in the design of therapeutic, prognostic and diagnostic products for such inflammatory conditions. Jk-recombination signal binding protein is induced in macrophages activated by TNFalpha. The important role of Jk-recombination signal binding protein in the regulation of the immune response is thus modulated by hypoxia, and there are potentially many ways of exploiting that modulation in the design of diagnostics and therapeutics. Hypoxia is frequently found in human tumours where macrophage infiltrates are also found. In a series of 5 patients with either ovarian or breast cancer, Jk-recombination signal binding protein is down-regulated in the malignant tissue as compared to adjacent normal tissue in at least one patient. It is of particular interest and significance, in view of the escape from immunological surveillance of many tumours, that Jk-recombination signal binding protein is down-regulated.

[0947] Clone p1C14 represents Abstrakt. The protein sequence encoded by Abstrakt is represented in the public databases by the accession NP_{—}057306 and is described in this patent by SEQ ID NO: 383. The nucleotide sequence is represented in the public sequence databases by the accession NM_{—}016222 and is described in this patent by SEQ ID NO: 384. Hypoxia is an important feature of several diseases, and genes that respond to this stimulus are therefore implicated in the pathogenesis and have utility in the design of therapeutic, prognostic and diagnostic products. Macrophages are key to several diseases involving hypoxia, and contribute to inflammatory processes. In these, macrophages are frequently activated by cytokines, which have been shown to be present at disease sites, so gene expression responses to both hypoxia and cytokines are especially relevant. Abstrakt is repressed in macrophages activated by IL-15. TNFalpha is an inflammatory cytokine, which acts on macrophages, and has been shown to be central to the pathophysiology and treatment of diseases including rheumatoid arthritis. Genes that change in expression in response to TNFalpha therefore have utility in the design of therapeutic, prognostic and diagnostic products for such inflammatory conditions. Abstrakt is induced in macrophages activated by TNFalpha. The general role of Abstrakt in the regulation of gene expression [Schmucker et al 2000, Mech Dev 91:189-96] implies particular significance to the recovery of cells from hypoxic insult.

[0948] Clone p1C15 represents High-mobility group protein 2. The protein sequence encoded by High-mobility group protein 2 is represented in the public databases by the accession NP_{—}002120 and is described in this patent by SEQ ID NO: 385. The nucleotide sequence is represented in the public sequence databases by the accession NM_{—}002129 and is described in this patent by SEQ ID NO: 386. Hypoxia is an important feature of several diseases, and genes that respond to this stimulus are therefore implicated in the pathogenesis and have utility in the design of therapeutic, prognostic and diagnostic products.

[0949] Clone p1C16 represents Decidual protein induced by progesterone. The protein sequence encoded by Decidual protein induced by progesterone is represented in the public databases by the accession NP_{—}008952 and is described in this patent by SEQ ID NO: 387. The nucleotide sequence is represented in the public sequence databases by the accession NM_{—}007021 and is described in this patent by SEQ ID NO: 388. Hypoxia is an important feature of several diseases, and genes that respond to this stimulus are therefore implicated in the pathogenesis and have utility in the design of therapeutic, prognostic and diagnostic products. Decidual protein induced by progesterone is preferentially induced by hypoxia in mammary epithelial cells. Human decidual cells have not been tested, but we predict that Decidual protein induced by progesterone is hypoxia-regulated in those cells. Macrophages are key to several diseases involving hypoxia, and contribute to inflammatory processes. In these, macrophages are frequently activated by cytokines, which have been shown to be present at disease sites, so gene expression responses to both hypoxia and cytokines are especially relevant. Decidual protein induced by progesterone is repressed in macrophages activated by IL-17.

[0950] Clone p1C19 represents GM2 ganglioside activator protein. The protein sequence encoded by GM2 ganglioside activator protein is represented in the public databases by the accession NP_{—}000396 and is described in this patent by SEQ ID NO: 389. The nucleotide sequence is represented in the public sequence databases by the accession NM_{—}000405 and is described in this patent by SEQ ID NO: 390. Hypoxia is an important feature of several diseases, and genes that respond to this stimulus are therefore implicated in the pathogenesis and have utility in the design of therapeutic, prognostic and diagnostic products. There is a prejudice in the art that the response to hypoxia is generic to all cell types. Contrary to this, we show that genes are regulated by hypoxia to a greater degree in certain cell types, substantiating their utility in designing specific therapeutic products for diseases involving those cell types. Monocytes and macrophages have been implicated in the following diseases involving hypoxia: rheumatoid arthritis, atherosclerosis, cancer, COPD. GM2 ganglioside activator protein is preferentially induced by hypoxia in monocytes or macrophages. The hypoxia-inducibility of this protein in macrophages is likely to be clinically very significant. It is likely to play a role in the control of inflammation in asthma and inflammatory bowel disease, and in lipid metabolism and phosphatidylinositol-mediated signalling.

[0951] Clone p1C20 represents CNOT8. The protein sequence encoded by CNOT8 is represented in the public databases by the accession NP_{—}004770 and is described in this patent by SEQ ID NO: 391. The nucleotide sequence is represented in the public sequence databases by the accession NM_{—}004779 and is described in this patent by SEQ ID NO: 392. Hypoxia is an important feature of several diseases, and genes that respond to this stimulus are therefore implicated in the pathogenesis and have utility in the design of therapeutic, prognostic and diagnostic products.

[0952] The protein sequence encoded by Similar to Nucleoside phosphorylase is not represented in the public databases by a protein accession. The nucleotide sequence is represented in the public sequence databases by the accession AA430382 and is described in this patent by SEQ ID NO: 394. Hypoxia is an important feature of several diseases, and genes that respond to this stimulus are therefore implicated in the pathogenesis and have utility in the design of therapeutic, prognostic and diagnostic products.

[0953] Clone p1P5 represents SCYA2. The protein sequence encoded by SCYA2 is represented in the public databases by the accession NP_{—}002973 and is described in this patent by SEQ ID NO: 395. The nucleotide sequence is represented in the public sequence databases by the accession NM_{—}002982 and is described in this patent by SEQ ID NO: 396. Hypoxia is an important feature of several diseases, and genes that respond to this stimulus are therefore implicated in the pathogenesis and have utility in the design of therapeutic, prognostic and diagnostic products. Macrophages are key to several diseases involving hypoxia, and contribute to inflammatory processes. In these, macrophages are frequently activated by cytokines, which have been shown to be present at disease sites, so gene expression responses to both hypoxia and cytokines are especially relevant. SCYA2 is induced in macrophages activated by LPS and gamma interferon and is also induced in macrophages activated by IL-17 or IL-15. Thus the role of SCYA2 in monocyte recruitment [Lu et al 1998, J Exp Med 187:601-8], which has clear relevance to the diagnosis and treatment of cardiovascular disease, cancer, rheumatoid arthritis, atherosclerosis and COPD, is enhanced by hypoxia. TNFalpha is an inflammatory cytokine, which acts on macrophages, and has been shown to be central to the pathophysiology and treatment of diseases including rheumatoid arthritis. Genes that change in expression in response to TNFalpha therefore have utility in the design of therapeutic, prognostic and diagnostic products for such inflammatory conditions. SCYA2 is repressed in macrophages activated by TNFalpha. Hypoxia is frequently found in human tumours where macrophage infiltrates are also found. In a series of 5 patients with either ovarian or breast cancer, SYCA2 is down-regulated in the malignant tissue as compared to adjacent normal tissue in at least one patient.

[0954] Clone p2L23 represents Endothelin 1. The protein sequence encoded by Endothelin 1 is represented in the public databases by the accession NP_{—}001946 and is described in this patent by SEQ ID NO: 397. The nucleotide sequence is represented in the public sequence databases by the accession NM_{—}001955 and is described in this patent by SEQ ID NO: 398. Hypoxia is an important feature of several diseases, and genes that respond to this stimulus are therefore implicated in the pathogenesis and have utility in the design of therapeutic, prognostic and diagnostic products. Macrophages are key to several diseases involving hypoxia, and contribute to inflammatory processes. In these, macrophages are frequently activated by cytokines, which have been shown to be present at disease sites, so gene expression responses to both hypoxia and cytokines are especially relevant. Endothelin 1 is induced in macrophages activated by LPS and gamma interferon. TNFalpha is an inflammatory cytokine, which acts on macrophages, and has been shown to be central to the pathophysiology and treatment of diseases including rheumatoid arthritis. Genes that change in expression in response to TNFalpha therefore have utility in the design of therapeutic, prognostic and diagnostic products for such inflammatory conditions. Endothelin 1 is induced in macrophages activated by TNFalpha. Endothelin 1 plays an important role in inducing proliferation of vascular smooth muscle cells. Its hypoxia-inducibility and thus its modulation to ameliorate the consequences of ischaemic insult, is of considerable clinical significance to the recovery from injury, and angiogenesis.

[0955] The protein sequence encoded by Similar to Heat shock 70 kD protein 4 is not represented in the public databases by a protein accession. The nucleotide sequence is represented in the public sequence databases by the accession AA633656 and is described in this patent by SEQ ID NO: 400. Hypoxia is an important feature of several diseases, and genes that respond to this stimulus are therefore implicated in the pathogenesis and have utility in the design of therapeutic, prognostic and diagnostic products.

[0956] Clone p1K9 represents Lipocortin I. The protein sequence encoded by Lipocortin I is represented in the public databases by the accession NP_{—}000691 and is described in this patent by SEQ ID NO: 401. The nucleotide sequence is represented in the public sequence databases by the accession NM_{—}000700 and is described in this patent by SEQ ID NO: 402. Hypoxia is an important feature of several diseases, and genes that respond to this stimulus are therefore implicated in the pathogenesis and have utility in the design of therapeutic, prognostic and diagnostic products. Lipocortin I (also called annexin I) is an important anti-inflammatory mediator, and its hypoxia-inducibility has important implications for the diagnosis and treatment of ischaemic disease, cancer, atherosclerosis, and inflammatory diseases such as rheumatoid arthritis. Hypoxia is frequently found in human tumours where macrophage infiltrates are also found. In a series of 5 patients with either ovarian or breast cancer, Lipocortin I is up-regulated in the malignant tissue as compared to adjacent normal tissue in at least one patient. Hypoxia is frequently found in human tumours where macrophage infiltrates are also found. In a series of 5 patients with either ovarian or breast cancer, Lipocortin I is down-regulated in the malignant tissue as compared to adjacent normal tissue in at least one patient.

[0957] Clone p1K23 represents MYC. The protein sequence encoded by MYC is represented in the public databases by the accession NP_{—}002458 and is described in this patent by SEQ ID NO: 403. The nucleotide sequence is represented in the public sequence databases by the accession NM_{—}002467 and is described in this patent by SEQ ID NO: 404. Hypoxia is an important feature of several diseases, and genes that respond to this stimulus are therefore implicated in the pathogenesis and have utility in the design of therapeutic, prognostic and diagnostic products. Macrophages are key to several diseases involving hypoxia, and contribute to inflammatory processes. In these, macrophages are frequently activated by cytokines, which have been shown to be present at disease sites, so gene expression responses to both hypoxia and cytokines are especially relevant. MYC is repressed in macrophages activated by LPS and gamma interferon. Hypoxia is frequently found in human tumours where macrophage infiltrates are also found. In a series of 5 patients with either ovarian or breast cancer, MYC is up-regulated and also down-regulated in the malignant tissue as compared to adjacent normal tissue in at least one patient.

[0958] Clone p1K15 represents Alpha-2-macroglobulin. The protein sequence encoded by Alpha-2-macroglobulin is represented in the public databases by the accession NP_{—}000005 and is described in this patent by SEQ ID NO: 405. The nucleotide sequence is represented in the public sequence databases by the accession NM_{—}000014 and is described in this patent by SEQ ID NO: 406. Hypoxia is an important feature of several diseases, and genes that respond to this stimulus are therefore implicated in the pathogenesis and have utility in the design of therapeutic, prognostic and diagnostic products. There is a prejudice in the art that the response to hypoxia is generic to all cell types. Contrary to this, we show that genes are regulated by hypoxia to a greater degree in certain cell types, substantiating their utility in designing specific therapeutic products for diseases involving those cell types. Monocytes and macrophages have been implicated in the following diseases involving hypoxia: rheumatoid arthritis, atherosclerosis, cancer, COPD. Alpha-2-macroglobulin is preferentially induced by hypoxia in monocytes or macrophages. Hypoxia is frequently found in human tumours where macrophage infiltrates are also found. In a series of 5 patients with either ovarian or breast cancer, Alpha-2-macroglobulin is down-regulated in the malignant tissue as compared to adjacent normal tissue in at least one patient.

[0959] Clone p1K8 represents SCYA4. The protein sequence encoded by SCYA4 is represented in the public databases by the accession XP_{—}008449 and is described in this patent by SEQ ID NO: 407. The nucleotide sequence is represented in the public sequence databases by the accession XM_{—}008449 and is described in this patent by SEQ ID NO: 408. Hypoxia is an important feature of several diseases, and genes that respond to this stimulus are therefore implicated in the pathogenesis and have utility in the design of therapeutic, prognostic and diagnostic products. Macrophages are key to several diseases involving hypoxia, and contribute to inflammatory processes. In these, macrophages are frequently activated by cytokines, which have been shown to be present at disease sites, so gene expression responses to both hypoxia and cytokines are especially relevant. SCYA4 is induced in macrophages activated by LPS and gamma interferon and is also induced in macrophages activated by IL-17. TNFalpha is an inflammatory cytokine, which acts on macrophages, and has been shown to be central to the pathophysiology and treatment of diseases including rheumatoid arthritis. Genes that change in expression in response to TNFalpha therefore have utility in the design of therapeutic, prognostic and diagnostic products for such inflammatory conditions. SCYA4 is induced in macrophages activated by TNFalpha. SCYA4 is a chemokine which is likely to be significant in inflammatory disease as a direct result of its hypoxic regulation. Hypoxia is frequently found in human tumours where macrophage infiltrates are also found. In a series of 5 patients with either ovarian or breast cancer, SCYA4 is down-regulated in the malignant tissue as compared to adjacent normal tissue in at least one patient.

[0960] Clone p1M24 represents Sex hormone-binding globulin. The protein sequence encoded by Sex hormone-binding globulin is represented in the public databases by the accession NP_{—}001031 and is described in this patent by SEQ ID NO: 409. The nucleotide sequence is represented in the public sequence databases by the accession NM_{—}001040 and is described in this patent by SEQ ID NO: 410. Hypoxia is an important feature of several diseases, and genes that respond to this stimulus are therefore implicated in the pathogenesis and have utility in the design of therapeutic, prognostic and diagnostic products.

[0961] Clone p1K7 represents ATP-binding cassette E1. The protein sequence encoded by ATP-binding cassette E1 is represented in the public databases by the accession NP_{—}002931 and is described in this patent by SEQ ID NO: 411. The nucleotide sequence is represented in the public sequence databases by the accession NM_{—}002940 and is described in this patent by SEQ ID NO: 412. Hypoxia is an important feature of several diseases, and genes that respond to this stimulus are therefore implicated in the pathogenesis and have utility in the design of therapeutic, prognostic and diagnostic products. Macrophages are key to several diseases involving hypoxia, and contribute to inflammatory processes. In these, macrophages are frequently activated by cytokines, which have been shown to be present at disease sites, so gene expression responses to both hypoxia and cytokines are especially relevant. ATP-binding cassette E1 is repressed in macrophages activated by LPS and gamma interferon.

[0962] Clone p1K16 represents CCT6A. The protein sequence encoded by CCT6A is represented in the public databases by the accession NP_{—}001753 and is described in this patent by SEQ ID NO: 413. The nucleotide sequence is represented in the public sequence databases by the accession NM_{—}001762 and is described in this patent by SEQ ID NO: 414. Hypoxia is an important feature of several diseases, and genes that respond to this stimulus are therefore implicated in the pathogenesis and have utility in the design of therapeutic, prognostic and diagnostic products.

[0963] Clone p1K18 represents Colony-stimulating factor1. The protein sequence encoded by Colony-stimulating factor1 is represented in the public databases by the accession AAA52117 and is described in this patent by SEQ ID NO: 415. The nucleotide sequence is represented in the public sequence databases by the accession M37435 and is described in this patent by SEQ ID NO: 416. Hypoxia is an important feature of several diseases, and genes that respond to this stimulus are therefore implicated in the pathogenesis and have utility in the design of therapeutic, prognostic and diagnostic products. Macrophages are key to several diseases involving hypoxia, and contribute to inflammatory processes. In these, macrophages are frequently activated by cytokines, which have been shown to be present at disease sites, so gene expression responses to both hypoxia and cytokines are especially relevant. Colony-stimulating factorl is repressed in macrophages activated by LPS and gamma interferon.

[0964] Clone p1N1 represents GA17. The protein sequence encoded by GA17 is represented in the public databases by the accession NP_{—}006351 and is described in this patent by SEQ ID NO: 417. The nucleotide sequence is represented in the public sequence databases by the accession NM_{—}006360 and is described in this patent by SEQ ID NO: 418. Hypoxia is an important feature of several diseases, and genes that respond to this stimulus are therefore implicated in the pathogenesis and have utility in the design of therapeutic, prognostic and diagnostic products.

[0965] Clone p1K22 represents GPR44. The protein sequence encoded by GPR44 is represented in the public databases by the accession NP_{—}004769 and is described in this patent by SEQ ID NO: 419. The nucleotide sequence is represented in the public sequence databases by the accession NM_{—}004778 and is described in this patent by SEQ ID NO: 420. Hypoxia is an important feature of several diseases, and genes that respond to this stimulus are therefore implicated in the pathogenesis and have utility in the design of therapeutic, prognostic and diagnostic products. Macrophages are key to several diseases involving hypoxia, and contribute to inflammatory processes. In these, macrophages are frequently activated by cytokines, which have been shown to be present at disease sites, so gene expression responses to both hypoxia and cytokines are especially relevant. GPR44 is repressed in macrophages activated by LPS and gamma interferon. GPR44 is most similar to the chemoattractant GPCR's [Marchese et al 1999, Genomics Feb. 15, 1999;56(1):12-21]. Our demonstration of its hypoxic regulation enables prediction of roles in diseases associated with transient hypoxia and macrophages. GPCR's are a druggable class of molecules, and represent an ideal route for pharmacological intervention.

[0966] Clone p1K14 represents Keratin 6B. The protein sequence encoded by Keratin 6B is represented in the public databases by the accession NP_{—}005546 and is described in this patent by SEQ ID NO: 421. The nucleotide sequence is represented in the public sequence databases by the accession NM_{—}005555 and is described in this patent by SEQ ID NO: 422. Hypoxia is an important feature of several diseases, and genes that respond to this stimulus are therefore implicated in the pathogenesis and have utility in the design of therapeutic, prognostic and diagnostic products. Keratin 6B is induced in macrophages treated with the inhibitory cytokine IL-10. Keratin 6B is repressed in macrophages activated by IL-17 and is also repressed in macrophages activated by IL-15.

[0967] Clone p1K13 represents Lymphocyte adaptor protein. The protein sequence encoded by Lymphocyte adaptor protein is represented in the public databases by the accession NP_{—}005466 and is described in this patent by SEQ ID NO: 423. The nucleotide sequence is represented in the public sequence databases by the accession NM_{—}005475 and is described in this patent by SEQ ID NO: 424. Hypoxia is an important feature of several diseases, and genes that respond to this stimulus are therefore implicated in the pathogenesis and have utility in the design of therapeutic, prognostic and diagnostic products.

[0968] Clone p1J20 represents Neuro-oncological ventral antigen 1. The protein sequence encoded by Neuro-oncological ventral antigen 1 is represented in the public databases by the accession NP_{—}002506 and is described in this patent by SEQ ID NO: 425. The nucleotide sequence is represented in the public sequence databases by the accession NM_{—}002515 and is described in this patent by SEQ ID NO: 426. Hypoxia is an important feature of several diseases, and genes that respond to this stimulus are therefore implicated in the pathogenesis and have utility in the design of therapeutic, prognostic and diagnostic products. Hypoxia is frequently found in human tumours where macrophage infiltrates are also found. In a series of 5 patients with either ovarian or breast cancer, Neuro-oncological ventral antigen 1 is down-regulated in the malignant tissue as compared to adjacent normal tissue in at least one patient.

[0969] Clone p1J22 represents Neutral sphingomyelinase (N-SMase) activation associated factor. The protein sequence encoded by Neutral sphingomyelinase (N-SMase) activation associated factor is represented in the public databases by the accession NP_{—}003571 and is described in this patent by SEQ ID NO: 427. The nucleotide sequence is represented in the public sequence databases by the accession NM_{—}003580 and is described in this patent by SEQ ID NO: 428. Hypoxia is an important feature of several diseases, and genes that respond to this stimulus are therefore implicated in the pathogenesis and have utility in the design of therapeutic, prognostic and diagnostic products. Neutral sphingomyelinase (N-SMase) activation associated factor is induced in macrophages treated with the inhibitory cytokine IL-10. Neutral sphingomyelinase (N-SMase) activation associated factor is repressed in macrophages activated by IL-17 and is also repressed in macrophages activated by IL-15. We expect activation of of Neutral sphingomyelinase (N-SMase) to have an anti-inflammatory effect. This enzyme is known to modulate the sphingomyelin second messenger cycle, potentially interacting with the oxidative system. Our demonstration of hypoxic regulation provides a crucial indication of the benefit of therapeutic intervention via sphingomyelinase (N-SMase) for the treatment of inflammatory diseases and diseases related to the hypoxic macrophage.

[0970] Clone p1K1 represents Cyclophilin F. The protein sequence encoded by Cyclophilin F is represented in the public databases by the accession NP_{—}005720 and is described in this patent by SEQ ID NO: 429. The nucleotide sequence is represented in the public sequence databases by the accession NM_{—}005729 and is described in this patent by SEQ ID NO: 430. Hypoxia is an important feature of several diseases, and genes that respond to this stimulus are therefore implicated in the pathogenesis and have utility in the design of therapeutic, prognostic and diagnostic products. Hypoxia is frequently found in human tumours where macrophage infiltrates are also found. In a series of 5 patients with either ovarian or breast cancer, Cyclophilin F is up-regulated in the malignant tissue as compared to adjacent normal tissue in at least one patient.

[0971] Clone p1K3 represents Pleckstrin. The protein sequence encoded by Pleckstrin is represented in the public databases by the accession NP_{—}002655 and is described in this patent by SEQ ID NO: 431. The nucleotide sequence is represented in the public sequence databases by the accession NM_{—}002664 and is described in this patent by SEQ ID NO: 432. Hypoxia is an important feature of several diseases, and genes that respond to this stimulus are therefore implicated in the pathogenesis and have utility in the design of therapeutic, prognostic and diagnostic products. There is a prejudice in the art that the response to hypoxia is generic to all cell types. Contrary to this, we show that genes are regulated by hypoxia to a greater degree in certain cell types, substantiating their utility in designing specific therapeutic products for diseases involving those cell types. Monocytes and macrophages have been implicated in the following diseases involving hypoxia: rheumatoid arthritis, atherosclerosis, cancer, COPD. Pleckstrin is preferentially induced by hypoxia in monocytes or macrophages. Macrophages are key to several diseases involving hypoxia, and contribute to inflammatory processes. In these, macrophages are frequently activated by cytokines, which have been shown to be present at disease sites, so gene expression responses to both hypoxia and cytokines are especially relevant. Pleckstrin is induced in macrophages activated by LPS and gamma interferon. Hypoxia is frequently found in human tumours where macrophage infiltrates are also found. In a series of 5 patients with either ovarian or breast cancer, Pleckstrin is down-regulated in the malignant tissue as compared to adjacent normal tissue in at least one patient.

[0972] Clones p1J19 and p1K2 represent CFFM4. The protein sequence encoded by CFFM4 is represented in the public databases by the accession NP_{—}067024 and is described in this patent by SEQ ID NO: 433. The nucleotide sequence is represented in the public sequence databases by the accession NM_{—}021201 and is described in this patent by SEQ ID NO: 434. Hypoxia is an important feature of several diseases, and genes that respond to this stimulus are therefore implicated in the pathogenesis and have utility in the design of therapeutic, prognostic and diagnostic products. There is a prejudice in the art that the response to hypoxia is generic to all cell types. Contrary to this, we show that genes are regulated by hypoxia to a greater degree in certain cell types, substantiating their utility in designing specific therapeutic products for diseases involving those cell types. Monocytes and macrophages have been implicated in the following diseases involving hypoxia: rheumatoid arthritis, atherosclerosis, cancer, COPD. CFFM4 is preferentially induced by hypoxia in monocytes or macrophages. CFFM4 is induced in macrophages treated with the inhibitory cytokine IL-10. It has been suggested recently that CFFM4 is associated with mature cellular function in the monocytic lineage and that it may be a component of a receptor complex involved in signal transduction [Gingras et al 2001, Immunogenetics 53:468-76]. Our demonstration of hypoxic-regulation opens possible routes of intervention in macrophage-related disease via this potentially important cell surface receptor. Hypoxia is frequently found in human tumours where macrophage infiltrates are also found. In a series of 5 patients with either ovarian or breast cancer, CFFM4 is down-regulated in the malignant tissue as compared to adjacent normal tissue in at least one patient.

[0973] Clone p1K5 represents Ribosomal protein L36a. The protein sequence encoded by Ribosomal protein L36a is represented in the public databases by the accession NP_{—}000992 and is described in this patent by SEQ ID NO: 435. The nucleotide sequence is represented in the public sequence databases by the accession NM_{—}001001 and is described in this patent by SEQ ID NO: 436. Hypoxia is an important feature of several diseases, and genes that respond to this stimulus are therefore implicated in the pathogenesis and have utility in the design of therapeutic, prognostic and diagnostic products.

[0974] Clone p1J17 represents SLC6A1. The protein sequence encoded by SLC6A1 is represented in the public databases by the accession NP_{—}003033 and is described in this patent by SEQ ID NO: 437. The nucleotide sequence is represented in the public sequence databases by the accession NM_{—}003042 and is described in this patent by SEQ ID NO: 438. Hypoxia is an important feature of several diseases, and genes that respond to this stimulus are therefore implicated in the pathogenesis and have utility in the design of therapeutic, prognostic and diagnostic products. Hypoxia is frequently found in human tumours where macrophage infiltrates are also found. In a series of 5 patients with either ovarian or breast cancer, SLC6A1 is up-regulated and also down-regulated in the malignant tissue as compared to adjacent normal tissue in at least one patient.

[0975] Clone p1J18 represents Synaptopodin. The protein sequence encoded by Synaptopodin is represented in the public databases by the accession NP_{—}009217 and is described in this patent by SEQ ID NO: 439. The nucleotide sequence is represented in the public sequence databases by the accession NM_{—}007286 and is described in this patent by SEQ ID NO: 440. Hypoxia is an important feature of several diseases, and genes that respond to this stimulus are therefore implicated in the pathogenesis and have utility in the design of therapeutic, prognostic and diagnostic products. Synaptopodin is a component of the cytoskeleton which has particular importance in neurons, where it is involved in synaptic plasticity. Its hypoxia-regulation is clearly potentially significant in the context of neurological disease. Hypoxia is frequently found in human tumours where macrophage infiltrates are also found. In a series of 5 patients with either ovarian or breast cancer, Synaptopodin is up-regulated and also down-regulated in the malignant tissue as compared to adjacent normal tissue in at least one patient.

[0976] Clone p1J15 represents TERA protein. The protein sequence encoded by TERA protein is represented in the public databases by the accession NP_{—}067061 and is described in this patent by SEQ ID NO: 441. The nucleotide sequence is represented in the public sequence databases by the accession NM_{—}021238 and is described in this patent by SEQ ID NO: 442. Hypoxia is an important feature of several diseases, and genes that respond to this stimulus are therefore implicated in the pathogenesis and have utility in the design of therapeutic, prognostic and diagnostic products. Hypoxia is frequently found in human tumours where macrophage infiltrates are also found. In a series of 5 patients with either ovarian or breast cancer, TERA protein is up-regulated and also down-regulated in the malignant tissue as compared to adjacent normal tissue in at least one patient.

[0977] Clone p1K4 represents TSC-22. The protein sequence encoded by TSC-22 is represented in the public databases by the accession NP_{—}006013 and is described in this patent by SEQ ID NO: 443. The nucleotide sequence is represented in the public sequence databases by the accession NM_{—}006022 and is described in this patent by SEQ ID NO: 444. Hypoxia is an important feature of several diseases, and genes that respond to this stimulus are therefore implicated in the pathogenesis and have utility in the design of therapeutic, prognostic and diagnostic products. TSC-22 is a transcriptional regulator of the leucine zipper class, and its hypoxic regulation is likely to have significant downstream effects which may be related to ischaemic disease. Thus it may provide important points of intervention in such diseases. Macrophages are key to several diseases involving hypoxia, and contribute to inflammatory processes. In these, macrophages are frequently activated by cytokines, which have been shown to be present at disease sites, so gene expression responses to both hypoxia and cytokines are especially relevant. TSC-22 is repressed in macrophages activated by LPS and gamma interferon. Hypoxia is frequently found in human tumours where macrophage infiltrates are also found. In a series of 5 patients with either ovarian or breast cancer, TSC-22 is down-regulated in the malignant tissue as compared to adjacent normal tissue in at least one patient.

[0978] Clone p2A14 represents an unannotated EST. The protein sequence encoded by this EST is not represented in the public databases by a protein accession. The nucleotide sequence is represented in the public sequence databases by the accession AA988110 and is described in this patent by SEQ ID NO: 446. Hypoxia is an important feature of several diseases, and genes that respond to this stimulus are therefore implicated in the pathogenesis and have utility in the design of therapeutic, prognostic and diagnostic products. The EST represented by SEQ ID NO: 446 is induced in macrophages treated with the inhibitory cytokine IL-10. The EST represented by SEQ ID NO: 446 is repressed in macrophages activated by IL-17 and is also repressed in macrophages activated by IL-15.

[0979] Clone p1J23 represents Calgranulin A. The protein sequence encoded by Calgranulin A is represented in the public databases by the accession NP_{—}002955 and is described in this patent by SEQ ID NO: 447. The nucleotide sequence is represented in the public sequence databases by the accession NM_{—}002964 and is described in this patent by SEQ ID NO: 448. Hypoxia is an important feature of several diseases, and genes that respond to this stimulus are therefore implicated in the pathogenesis and have utility in the design of therapeutic, prognostic and diagnostic products. Calgranulin A, called by its synonym S100A8, has been cited recently as “wound-regulated” [Thorey et al 2001, J Biol Chem 276:35818-25] which provides less precise support for our prior determination of its hypoxia-regulation. In its potential role as a chemoattractant, it would be an important point of intervention for the modulation of inflamnmatory processes. Macrophages are key to several diseases involving hypoxia, and contribute to inflammatory processes. In these, macrophages are frequently activated by cytokines, which have been shown to be present at disease sites, so gene expression responses to both hypoxia and cytokines are especially relevant. Calgranulin A is repressed in macrophages activated by LPS and gamma interferon. Hypoxia is frequently found in human tumours where macrophage infiltrates are also found. In a series of 5 patients with either ovarian or breast cancer, Calgranulin A is down-regulated in the malignant tissue as compared to adjacent normal tissue in at least one patient.

[0980] Clone p1J21 represents Replication factor C large subunit. The protein sequence encoded by Replication factor C large subunit is represented in the public databases by the accession NP_{—}002904 and is described in this patent by SEQ ID NO: 449. The nucleotide sequence is represented in the public sequence databases by the accession NM_{—}002913 and is described in this patent by SEQ ID NO: 450. Hypoxia is an important feature of several diseases, and genes that respond to this stimulus are therefore implicated in the pathogenesis and have utility in the design of therapeutic, prognostic and diagnostic products.

[0981] Clone p1J24 represents Signal recognition particle 19 kD. The protein sequence encoded by Signal recognition particle 19 kD is represented in the public databases by the accession NP_{—}003126 and is described in this patent by SEQ ID NO: 451. The nucleotide sequence is represented in the public sequence databases by the accession NM_{—}003135 and is described in this patent by SEQ ID NO: 452. Hypoxia is an important feature of several diseases, and genes that respond to this stimulus are therefore implicated in the pathogenesis and have utility in the design of therapeutic, prognostic and diagnostic products.

[0982] Clone p1J16 represents cDNA: FLJ23019 fis, clone LNG00916. The protein sequence encoded by cDNA: FLJ23019 fis, clone LNG00916 is not represented in the public databases by a protein accession. The nucleotide sequence is represented in the public sequence databases by the accession AK026672 and is described in this patent by SEQ ID NO: 454. Hypoxia is an important feature of several diseases, and genes that respond to this stimulus are therefore implicated in the pathogenesis and have utility in the design of therapeutic, prognostic and diagnostic products. Macrophages are key to several diseases involving hypoxia, and contribute to inflammatory processes. In these, macrophages are frequently activated by cytokines, which have been shown to be present at disease sites, so gene expression responses to both hypoxia and cytokines are especially relevant. The cDNA: FLJ23019 fis, clone LNG00916 is induced in macrophages activated by LPS and gamma interferon and is also induced in macrophages activated by IL-15.

[0983] Clone p1J2 represents Proteasome subunit, alpha type, 4. The protein sequence encoded by Proteasome subunit, alpha type, 4 is represented in the public databases by the accession NP_{—}002780 and is described in this patent by SEQ ID NO: 455. The nucleotide sequence is represented in the public sequence databases by the accession NM_{—}002789 and is described in this patent by SEQ ID NO: 456. Hypoxia is an important feature of several diseases, and genes that respond to this stimulus are therefore implicated in the pathogenesis and have utility in the design of therapeutic, prognostic and diagnostic products.

[0984] Clone p1J9 represents MAFB. The protein sequence encoded by MAFB is represented in the public databases by the accession NP_{—}005452 and is described in this patent by SEQ ID NO: 457. The nucleotide sequence is represented in the public sequence databases by the accession NM_{—}005461 and is described in this patent by SEQ ID NO: 458. Hypoxia is an important feature of several diseases, and genes that respond to this stimulus are therefore implicated in the pathogenesis and have utility in the design of therapeutic, prognostic and diagnostic products. MAFB is a transcriptional regulator of the leucine zipper type, and is likely to play an important role in the mediation of the hypoxic response, with attendant relevance to associated diseases.

[0985] Clone p1J10 represents DNCLI2. The protein sequence encoded by DNCLI2 is represented in the public databases by the accession NP_{—}006132 and is described in this patent by SEQ ID NO: 459. The nucleotide sequence is represented in the public sequence databases by the accession NM_{—}006141 and is described in this patent by SEQ ID NO: 460. Hypoxia is an important feature of several diseases, and genes that respond to this stimulus are therefore implicated in the pathogenesis and have utility in the design of therapeutic, prognostic and diagnostic products. Hypoxia is frequently found in human tumours where macrophage infiltrates are also found. In a series of 5 patients with either ovarian or breast cancer, gene X is down-regulated in the malignant tissue as compared to adjacent normal tissue in at least one patient.

[0986] Clone p1J1 represents Chromobox homolog 3. The protein sequence encoded by Chromobox homolog 3 is represented in the public databases by the accession NP_{—}057671 and is described in this patent by SEQ ID NO: 461. The nucleotide sequence is represented in the public sequence databases by the accession NM_{—}016587 and is described in this patent by SEQ ID NO: 462. Hypoxia is an important feature of several diseases, and genes that respond to this stimulus are therefore implicated in the pathogenesis and have utility in the design of therapeutic, prognostic and diagnostic products.

[0987] Clone p1J5 represents SCYA7. The protein sequence encoded by SCYA7 is represented in the public databases by the accession NP_{—}006264 and is described in this patent by SEQ ID NO: 463. The nucleotide sequence is represented in the public sequence databases by the accession NM_{—}006273 and is described in this patent by SEQ ID NO: 464. Hypoxia is an important feature of several diseases, and genes that respond to this stimulus are therefore implicated in the pathogenesis and have utility in the design of therapeutic, prognostic and diagnostic products. Macrophages are key to several diseases involving hypoxia, and contribute to inflammatory processes. In these, macrophages are frequently activated by cytokines, which have been shown to be present at disease sites, so gene expression responses to both hypoxia and cytokines are especially relevant. SCYA7 is induced in macrophages activated by IL-15. SCYA7 is a chemoattractant protein which, considering its hypoxia-regulation, is likely to play an important role in inflammatory and ischaemic disease. TNFalpha is an inflammatory cytokine, which acts on macrophages, and has been shown to be central to the pathophysiology and treatment of diseases including rheumatoid arthritis. Genes that change in expression in response to TNFalpha therefore have utility in the design of therapeutic, prognostic and diagnostic products for such inflammatory conditions. SCYA7 is repressed in macrophages activated by TNFalpha.

[0988] Clone p1J11 represents Fatty-acid-Coenzyme A ligase, long-chain 2. The protein sequence encoded by Fatty-acid-Coenzyme A ligase, long-chain 2 is represented in the public databases by the accession NP_{—}066945 and is described in this patent by SEQ ID NO: 465. The nucleotide sequence is represented in the public sequence databases by the accession NM_{—}021122 and is described in this patent by SEQ ID NO: 466. Hypoxia is an important feature of several diseases, and genes that respond to this stimulus are therefore implicated in the pathogenesis and have utility in the design of therapeutic, prognostic and diagnostic products. Macrophages are key to several diseases involving hypoxia, and contribute to inflammatory processes. In these, macrophages are frequently activated by cytokines, which have been shown to be present at disease sites, so gene expression responses to both hypoxia and cytokines are especially relevant. Fatty-acid-Coenzyme A ligase, long-chain 2 is induced in macrophages activated by LPS and gamma interferon and also induced in macrophages activated by IL-17 or IL-15. Hypoxia is frequently found in human tumours where macrophage infiltrates are also found. In a series of 5 patients with either ovarian or breast cancer, Fatty-acid-Coenzyme A ligase, long-chain 2 is down-regulated in the malignant tissue as compared to adjacent normal tissue in at least one patient.

[0989] Clone p1J8 represents Programmed cell death 5. The protein sequence encoded by Programmed cell death 5 is represented in the public databases by the accession NP_{—}004699 and is described in this patent by SEQ ID NO: 467. The nucleotide sequence is represented in the public sequence databases by the accession NM_{—}004708 and is described in this patent by SEQ ID NO: 468. Hypoxia is an important feature of several diseases, and genes that respond to this stimulus are therefore implicated in the pathogenesis and have utility in the design of therapeutic, prognostic and diagnostic products.

[0990] Clone p1I20 represents SCYA3L. The protein sequence encoded by SCYA3L is represented in the public databases by the accession CAA36397 and is described in this patent by SEQ ID NO: 469. The nucleotide sequence is represented in the public sequence databases by the accession X52149 and is described in this patent by SEQ ID NO: 470. Hypoxia is an important feature of several diseases, and genes that respond to this stimulus are therefore implicated in the pathogenesis and have utility in the design of therapeutic, prognostic and diagnostic products. There is a prejudice in the art that the response to hypoxia is generic to all cell types. Contrary to this, we show that genes are regulated by hypoxia to a greater degree in certain cell types, substantiating their utility in designing specific therapeutic products for diseases involving those cell types. Monocytes and macrophages have been implicated in the following diseases involving hypoxia: rheumatoid arthritis, atherosclerosis, cancer, COPD. SCYA3L is preferentially induced by hypoxia in monocytes or macrophages. Macrophages are key to several diseases involving hypoxia, and contribute to inflammatory processes. In these, macrophages are frequently activated by cytokines, which have been shown to be present at disease sites, so gene expression responses to both hypoxia and cytokines are especially relevant. SCYA3L is induced in macrophages activated by LPS and gamma interferon. TNFalpha is an inflammatory cytokine, which acts on macrophages, and has been shown to be central to the pathophysiology and treatment of diseases including rheumatoid arthritis. Genes that change in expression in response to TNFalpha therefore have utility in the design of therapeutic, prognostic and diagnostic products for such inflammatory conditions. SCYA3L is induced in macrophages activated by TNFalpha.

[0991] Clone p1J3 represents Furin. The protein sequence encoded by Furin is represented in the public databases by the accession NP_{—}002560 and is described in this patent by SEQ ID NO: 471. The nucleotide sequence is represented in the public sequence databases by the accession NM_{—}002569 and is described in this patent by SEQ ID NO: 472. Hypoxia is an important feature of several diseases, and genes that respond to this stimulus are therefore implicated in the pathogenesis and have utility in the design of therapeutic, prognostic and diagnostic products.

[0992] Clone p1J12 represents Nuclear autoantigenic sperm protein. The protein sequence encoded by Nuclear autoantigenic sperm protein is represented in the public databases by the accession NP_{—}002473 and is described in this patent by SEQ ID NO: 473. The nucleotide sequence is represented in the public sequence databases by the accession NM_{—}002482 and is described in this patent by SEQ ID NO: 474. Hypoxia is an important feature of several diseases, and genes that respond to this stimulus are therefore implicated in the pathogenesis and have utility in the design of therapeutic, prognostic and diagnostic products.

[0993] Clone p1I23 represents Ecotropic viral integration site 2A. The protein sequence encoded by Ecotropic viral integration site 2A is represented in the public databases by the accession NP_{—}055025 and is described in this patent by SEQ ID NO: 475. The nucleotide sequence is represented in the public sequence databases by the accession NM_{—}014210 and is described in this patent by SEQ ID NO: 476. Hypoxia is an important feature of several diseases, and genes that respond to this stimulus are therefore implicated in the pathogenesis and have utility in the design of therapeutic, prognostic and diagnostic products. There is a prejudice in the art that the response to hypoxia is generic to all cell types. Contrary to this, we show that genes are regulated by hypoxia to a greater degree in certain cell types, substantiating their utility in designing specific therapeutic products for diseases involving those cell types. Monocytes and macrophages have been implicated in the following diseases involving hypoxia: rheumatoid arthritis, atherosclerosis, cancer, COPD. Ecotropic viral integration site 2A is preferentially induced by hypoxia in monocytes or macrophages. Macrophages are key to several diseases involving hypoxia, and contribute to inflammatory processes. In these, macrophages are frequently activated by cytokines, which have been shown to be present at disease sites, so gene expression responses to both hypoxia and cytokines are especially relevant. Ecotropic viral integration site 2A is repressed in macrophages activated by LPS and gamma interferon. Hypoxia is frequently found in human tumours where macrophage infiltrates are also found. In a series of 5 patients with either ovarian or breast cancer, Ecotropic viral integration site 2A is down-regulated in the malignant tissue as compared to adjacent normal tissue in at least one patient.

[0994] Clone p1J7 represents Sjogren syndrome antigen B. The protein sequence encoded by Sjogren syndrome antigen B is represented in the public databases by the accession NP_{—}003133 and is described in this patent by SEQ ID NO: 477. The nucleotide sequence is represented in the public sequence databases by the accession NM_{—}003142 and is described in this patent by SEQ ID NO: 478. Hypoxia is an important feature of several diseases, and genes that respond to this stimulus are therefore implicated in the pathogenesis and have utility in the design of therapeutic, prognostic and diagnostic products. Sjogren syndrome antigen B is preferentially induced by hypoxia in mammary epithelial cells. Macrophages are key to several diseases involving hypoxia, and contribute to inflammatory processes. In these, macrophages are frequently activated by cytokines, which have been shown to be present at disease sites, so gene expression responses to both hypoxia and cytokines are especially relevant. Sjogren syndrome antigen B is induced in macrophages activated by LPS and gamma interferon.

[0995] Clone p1I21 represents SCYA8. The protein sequence encoded by SCYA8 is represented in the public databases by the accession NP_{—}005614 and is described in this patent by SEQ ID NO: 479. The nucleotide sequence is represented in the public sequence databases by the accession NM_{—}005623 and is described in this patent by SEQ ID NO: 480. Hypoxia is an important feature of several diseases, and genes that respond to this stimulus are therefore implicated in the pathogenesis and have utility in the design of therapeutic, prognostic and diagnostic products. Macrophages are key to several diseases involving hypoxia, and contribute to inflammatory processes. In these, macrophages are frequently activated by cytokines, which have been shown to be present at disease sites, so gene expression responses to both hypoxia and cytokines are especially relevant. SCYA8 is induced in macrophages activated by LPS and gamma interferon and is also induced in macrophages activated by IL-15.

[0996] Clone p1I19 represents GRO2. The protein sequence encoded by GRO2 is represented in the public databases by the accession NP_{—}002080 and is described in this patent by SEQ ID NO: 481. The nucleotide sequence is represented in the public sequence databases by the accession NM_{—}002089 and is described in this patent by SEQ ID NO: 482. Hypoxia is an important feature of several diseases, and genes that respond to this stimulus are therefore implicated in the pathogenesis and have utility in the design of therapeutic, prognostic and diagnostic products. Macrophages are key to several diseases involving hypoxia, and contribute to inflammatory processes. In these, macrophages are frequently activated by cytokines, which have been shown to be present at disease sites, so gene expression responses to both hypoxia and cytokines are especially relevant. GRO2 is induced in macrophages activated by LPS and gamma interferon and is also induced in macrophages activated by IL-17. GRO2 encodes a chemokine which is likely to be involved in the inflammatory response. Its induction by hypoxia provides a potential route for intervention in diseases related to inflammation and ischaemia. Hypoxia is frequently found in human tumours where macrophage infiltrates are also found. In a series of 5 patients with either ovarian or breast cancer, GRO2 is down-regulated in the malignant tissue as compared to adjacent normal tissue in at least one patient.

[0997] Clone p1J4 represents Small nuclear ribonucleoprotein D1. The protein sequence encoded by Small nuclear ribonucleoprotein D1 is represented in the public databases by the accession NP_{—}008869 and is described in this patent by SEQ ID NO: 483. The nucleotide sequence is represented in the public sequence databases by the accession NM_{—}006938 and is described in this patent by SEQ ID NO: 484. Hypoxia is an important feature of several diseases, and genes that respond to this stimulus are therefore implicated in the pathogenesis and have utility in the design of therapeutic, prognostic and diagnostic products.

[0998] Clone p1I24 represents GRO1. The protein sequence encoded by GRO1 is represented in the public databases by the accession NP_{—}001502 and is described in this patent by SEQ ID NO: 485. The nucleotide sequence is represented in the public sequence databases by the accession NM_{—}001511 and is described in this patent by SEQ ID NO: 486. GRO1 has known chemotactic activity for neutrophils. GRO1 belongs to the intercrine alpha family of small CXC cytokines. GRO1 encodes a chemokine which is likely to be involved in the inflammatory response. Its induction by hypoxia provides a potential route for intervention in diseases related to inflammation and ischaemia. Hypoxia is an important feature of several diseases, and genes that respond to this stimulus are therefore implicated in the pathogenesis and have utility in the design of therapeutic, prognostic and diagnostic products. Macrophages are key to several diseases involving hypoxia, and contribute to inflammatory processes. In these, macrophages are frequently activated by cytokines, which have been shown to be present at disease sites, so gene expression responses to both hypoxia and cytokines are especially relevant. GRO1 is induced in macrophages activated by LPS and gamma interferon and is also induced in macrophages activated by IL-17. Hypoxia is frequently found in human tumours where macrophage infiltrates are also found. In a series of 5 patients with either ovarian or breast cancer, GRO1 is down-regulated in the malignant tissue as compared to adjacent normal tissue in at least one patient.

[0999] Clone p1I18 represents Selectin L. The protein sequence encoded by Selectin L is represented in the public databases by the accession NP_{—}000646 and is described in this patent by SEQ ID NO: 487. The nucleotide sequence is represented in the public sequence databases by the accession NM_{—}000655 and is described in this patent by SEQ ID NO: 488. Hypoxia is an important feature of several diseases, and genes that respond to this stimulus are therefore implicated in the pathogenesis and have utility in the design of therapeutic, prognostic and diagnostic products. Selectin L shedding by leucocytes is one aspect of the induction of the inflammatory response. Hypoxic-regulation of Selectin L is clearly a significant factor in the induction of inflammation following ischaemic insult or in diseases in which transient ischaemic conditions occur. Modulation of this induction is one aspect of the present invention. Hypoxia is frequently found in human tumours where macrophage infiltrates are also found. In a series of 5 patients with either ovarian or breast cancer, Selectin L is down-regulated in the malignant tissue as compared to adjacent normal tissue in at least one patient.

TABLE 1
Hypoxia-inducible genes identified from clones
only derived from the cardiomyoblast library

| | SEQ ID | | |
|---|---|---|---|
| GENE NAME | protein | nucleotide | Accession |
| Diacylglycerol kinase, zeta | 353 | 354 | NM_003646 |
| CCR4 associated factor 1 | 391 | 392 | AF053318 |
| GM2 ganglioside activator | 389 | 390 | X62078 |
| protein. | | | |
| Granulin | 269 | 270 | AK000607 |
| Serine protease 11 | 355 | 356 | Y07921 |
| High mobility group 2 protein | 385 | 386 | M83665 |
| Decidual protein induced by | 387 | 388 | NM_007021 |
| progesterone | | | |
| DEAD-box protein abstrakt | 383 | 384 | NM_016222 |
| IL-1 receptor antagonist | 357 | 358 | U65590 |
| KIAA1376 protein | 29 | 30 | AB037797 |
| hypothetical protein KIAA0127 | 31 | 32 | D50917 |
| hypothetical protein FLJ20308 | 33 | 34 | AL137263 |
| EST | 91 | 92 | AL390082 |
| EST | 89 | 90 | AL117352 |
| EST | 77 | 78 | AW664180 |

[1000] TABLE 2
Hypoxia-inducible genes identified from clones
only derived from the macrophage libraries

| | SEQID | | |
|---|---|---|---|
| GENE NAME | protein | nucleotide | Accession |
| Metallothionein-2a | 265 | 266 | J00271 |
| Metallothionein-1h | 239 | 240 | X64177 |
| Metallothionein-1G | 243 | 244 | J03910 |
| Interleukin 8 | 251 | 252 | Y00787 |
| Lactate dehydrogenase A | 223 | 224 | NM_005566 |
| UDP-glucose pyrophosphorylase 2 | 347 | 348 | NM_006759 |
| Enolase 1 | 257 | 258 | NM_001428 |
| Enolase 2 | 273 | 274 | NM_001975 |
| Tissue factor/coagulation | 225 | 226 | NM_001993 |
| factor III/thromboplastin | | | |
| proline 4-hydroxylase, alpha | 231 | 232 | NM_000917 |
| polypeptide 1 | | | |
| proline 4-hydroxylase, alpha | 349 | 350 | NM_004199 |
| polypeptide II | | | |
| NS1-binding protein | 359 | 360 | NM_006469 |
| FGF receptor activating protein | 363 | 364 | AF159621 |
| 1 | | | |
| Adenylate kinase 3 | 263 | 264 | NM_013410 |
| Osteopontin | 267 | 268 | X13694 |
| Aldolase C, fructose- | 259 | 260 | NM_005165 |
| bisphosphate | | | |
| Galectin-8 | 365 | 366 | AF193806 |
| Regulator of G-protein | 375 | 376 | S59049 |
| signalling 1 (BL34) | | | |
| Polyubiquitin UbC | 377 | 378 | AB009010 |
| Activin A receptor type I | 361 | 362 | NM_001105 |
| Glyceraldehyde-3-phosphate | 253 | 254 | NM_002046 |
| dehydrogenase | | | |
| Phosphoglycerate kinase 1 | 255 | 256 | NM_000291 |
| Rab-8b | 373 | 374 | NM_016530 |
| Glucose phosphate isomerase | 367 | 368 | NM_000175 |
| D123 gene product (HT1080) | 369 | 370 | U27112 |
| Integrin alpha 5 | 379 | 380 | NM_002205 |
| Triosephosphate isomerase 1 | 261 | 262 | NM_000365 |
| solute carrier family 31 (copper | 345 | 346 | NM_001860 |
| transporters), member 2 | | | |
| Jk-recombination signal binding | 381 | 382 | L07872 |
| protein | | | |
| N-myc downstream regulated | 229 | 230 | D87953 |
| (NDRG1/RTP) | | | |
| Plasminogen activator | 235 | 236 | M16006 |
| inhibitor-1 | | | |
| Dec-1 | 371 | 372 | NM_003670 |
| FUSIN/CXCR4 | 331 | 332 | NM_003467 |
| hypothetical protein FLJ20500 | 25 | 26 | AK000507 |
| DKFZP564D116 protein | 27 | 28 | AL050022 |
| hypothetical protein FLJ10134 | 23 | 24 | AK000996 |
| cDNA FLJ10433 fis NT2RP1000478 | 73 | 74 | AK001295 |
| ESTs | 93 | 94 | AW250104 |
| ESTs | 95 | 96 | BE382614 |
| ESTs | 67 | 68 | AW071063 |
| ESTs | 67 | 68 | AW964331 |
| ESTs | 133 | 134 | AA612751 |
| Singleton EST (not in UniGene) | 135 | 136 | AI018611 |

[1001] The gene entitled “Jk-recombination signal binding protein” was found to be hypoxia-inducible using subtracted cDNA probes for hybridization, but with non-subtracted probes, where the hybridization is quantitive, no signal was detected. This indicates that the gene is probably hypoxia-regulated but the absolute expression levels are very low.

TABLE 3
Hypoxia-inducible genes identified from clones derived
from both macrophage and myoblast libraries.

| | | | | Hypoxia/ | Hypoxia/ |
|---|---|---|---|---|---|
| | | SEQ ID | | normoxia | normoxia |
| GENE NAME | Accession | protein | nucleotide | (macrophage) | (myoblast) |
| Solute carrier family 2, | NM_006931 | 247 | 248 | 91.39 | 8.23 |
| member 3 | | | | | |
| Solute carrier family 2, | NM_003039 | 311 | 312 | 10.75 | 2.26 |
| member 5 | | | | | |
| Adiphophilin | NM_001122 | 313 | 314 | 13.97 | 5.10 |
| Hexokinase 2 | NM_000189 | 249 | 250 | 11.50 | 6.25 |
| Stearoyl-CoA desaturase | AB032261 | 351 | 352 | 3.74 | 2.31 |
| cDNA DKFZp434O071 | AF125392 | 75 | 76 | 2.31 | 2.75 |
| Hypoxia-inducible protein | NM_013332 | 271 | 272 | 3.62 | 5.07 |
| 2 | | | | | |

[1002] TABLE 4
Hypoxia responses amplified by HIF1 alpha overexpression

| | Nucl | | | | | | | | | |
|---|---|---|---|---|---|---|---|---|---|---|
| | SEQ | | | | | | | | | |
| | ID | Experimental Condition # | | | | | | | | |
| Gene Name | NO: | 1 | 2 | 3 | 4 | 5 | 6 | 7 | 8 | 9 |
| Metallothionein 2A | 265 | 1 | 0.57 | 0.69 | 3.33 | 3.22 | 5.77 | 10.37 | 2.05 | 1.70 |
| Metallothionein 1G | 244 | 1 | 0.68 | 0.64 | 4.23 | 4.21 | 7.35 | 11.03 | 3.65 | 2.28 |
| hypothetical protein hqp0376 | 338 | 1 | 0.79 | 0.61 | 6.54 | 4.44 | 9.01 | 11.54 | 4.17 | 3.22 |
| Novel Metallothionein | 84 | 1 | 0.95 | 0.78 | 5.18 | 4.36 | 8.20 | 11.16 | 3.48 | 2.94 |

Legend: Data shown in the average of 4 repeat experiments. Experimental condition is as shown in the text. Values represent fold change as compared to untreated cells (condition 1).

[1003] TABLE 5
Hypoxia responses amplified by EPASl overexpression

| | Nucl | | | | | | | | | |
|---|---|---|---|---|---|---|---|---|---|---|
| | SEQ | | | | | | | | | |
| | ID | Experimental Condition # | | | | | | | | |
| Gene Name | NO: | 1 | 2 | 3 | 4 | 5 | 6 | 7 | 8 | 9 |
| cDNA DKFZp586E1624 | 66 | 1 | 0.77 | 0.67 | 1.00 | 1.12 | 1.58 | 0.83 | 2.60 | 2.49 |
| Butyrate response factor 1 | 328 | 1 | 0.74 | 0.64 | 1.60 | 1.64 | 1.57 | 1.23 | 2.19 | 3.20 |
| hypothetical protein FLJ10134 | 24 | 1 | 0.62 | 0.53 | 2.73 | 2.09 | 2.80 | 2.87 | 4.20 | 3.65 |
| EGL nine (C. elegans) homolog 3 | 86 | 1 | 1.34 | 0.81 | 1.98 | 1.90 | 2.02 | 1.94 | 2.81 | 3.12 |
| ERO1 (S. cerevisiae)-like | 68 | 1 | 1.02 | 1.30 | 4.26 | 4.14 | 4.76 | 4.12 | 4.91 | 6.44 |
| hypothetical protein FLJ10134 | 24 | 1 | 0.68 | 0.53 | 2.03 | 1.97 | 3.01 | 2.46 | 3.67 | 2.95 |

Legend: Data shown is the average of 4 repeat experiments. Experimental condition is as shown in the text. Values represent fold change as compared to untreated cells (condition 1).

[1004] TABLE 6
Negative hypoxia responses amplified by HIF1 alpha/EPAS1 overexpression

| | Nucl | | | | | | | | | |
|---|---|---|---|---|---|---|---|---|---|---|
| | SEQ | | | | | | | | | |
| | ID | Experimental Condition # | | | | | | | | |
| Gene Name | NO: | 1 | 2 | 3 | 4 | 5 | 6 | 7 | 8 | 9 |
| hypothetical protein CGI-117 | 48 | 1 | 0.83 | 0.87 | 0.42 | 0.42 | 0.32 | 0.34 | 0.33 | 0.27 |

[1005] TABLE 7
Genes induced by hypoxia (similar response +/− cell activation)

| | | | | | | RATIO | | |
|---|---|---|---|---|---|---|---|---|
| | | IMAGE | | SEQ ID | | Hypoxia/Normoxia | | Activated/Resting |
| Row | TITLE | Id | accession | protein | nucl | (resting) | (activated) | (normoxia) |
| 1 | Activated leucocyte cell | 26617 | R13558 | 277 | 278 | 1.46 | 1.86 | 0.46 |
| | adhesion molecule | | | | | | | |
| 2 | MAX-interacting protein 1 | 435219 | AA705886 | 279 | 280 | 2.55 | 3.18 | n/d |
| 3 | BCL2/adenovirus E1B 19kD- | 814899 | AA465697 | 217 | 218 | 2.50 | 3.48 | 0.41 |
| | interacting protein 3-like | | | | | | | |
| 4 | Nuclear receptor co-repressor | 488301 | AA085748 | 281 | 282 | 1.38 | 1.75 | 0.65 |
| 5 | Enolase 2, (gamma, neuronal) | 789147 | AA450189 | 273 | 274 | 2.87 | 4.98 | 1.32 |
| 6 | Chitinase 3-like 2 | 47043 | H10721 | 283 | 284 | 1.98 | 1.98 | n/d |
| 7 | BACH1 transcription factor | 2009495 | AI336948 | 285 | 286 | 2.34 | 2.23 | 1.30 |
| 8 | Solute carrier family 2, | 453589 | AA679565 | 219 | 220 | 8.50 | 6.80 | 0.59 |
| | member 1 | | | | | | | |
| 9 | Phosphoglucomutase 1 | 843174 | AA488504 | 287 | 288 | 1.43 | 1.83 | n/d |
| 10 | PDGF beta | 67654 | T49539 | 221 | 222 | 1.66 | 1.64 | 1.09 |
| 11 | PDGF beta | 343320 | W68169 | 221 | 222 | 1.86 | 1.67 | 0.84 |
| 12 | CGI-109 protein | 144862 | R78570 | 289 | 290 | 1.42 | 1.94 | n/d |
| 13 | SAP30 | 502142 | AA126982 | 291 | 292 | 2.03 | 3.49 | n/d |
| 14 | ATP-binding cassette | 827168 | AA521292 | 293 | 294 | 2.04 | 2.24 | 1.20 |
| | transporter-1 | | | | | | | |
| 15 | SEC24 protein | 712559 | AA278134 | 295 | 296 | 2.87 | 3.97 | n/d |
| 16 | Trinucleotide repeat containing | 199367 | R95691 | 297 | 298 | 1.92 | 1.38 | 1.35 |
| | 3 | | | | | | | |
| 17 | Post-synaptic density protein | 26021 | R39954 | 299 | 300 | 1.79 | 1.64 | 1.63 |
| | 95 | | | | | | | |
| 18 | Tumor protein D52 | 814306 | AA459318 | 301 | 302 | 1.24 | 1.75 | n/d |
| 19 | Cyclin-dependent kinase | 854668 | AA630082 | 303 | 304 | 2.36 | 1.57 | 2.19 |
| | inhibitor p27kip1 | | | | | | | |
| 20 | phosphoinositide-3-kinase, | 506009 | AA708437 | 305 | 306 | 1.44 | 2.11 | 0.26 |
| | catalytic, beta | | | | | | | |
| 21 | CDNA FLJ13611 fis, clone | 49918 | H15296 | 1 | 2 | 2.33 | 2.54 | n/d |
| | PLACE1010802 | | | | | | | |
| 22 | Solute carrier family 5, | 345743 | W72666 | 307 | 308 | 3.33 | 4.42 | 1.14 |
| | member 3 | | | | | | | |
| 23 | PSCDBP | 824531 | AA490903 | 309 | 310 | 2.02 | 1.90 | n/d |
| 24 | lactate dehydrogenase A | 43550 | H05914 | 223 | 224 | 2.13 | 2.23 | 1.23 |
| 25 | Solute carrier family 2, | 190732 | H38650 | 311 | 312 | 2.72 | 3.45 | n/d |
| | member 5 | | | | | | | |
| 26 | Adipophilin | 435036 | AA700054 | 313 | 314 | 6.28 | 2.39 | n/d |
| 27 | Tissue factor | 1928791 | AI313387 | 225 | 226 | 1.34 | 2.21 | 0.62 |
| 28 | Vascular endothelial growth | 34778 | R19956 | 227 | 228 | 1.53 | 1.97 | n/d |
| | factor | | | | | | | |
| 29 | RTP/NDRG1 | 842863 | AA489261 | 229 | 230 | 3.40 | 3.06 | 2.38 |
| 30 | Early development regulator 2 | 898328 | AA598840 | 315 | 316 | 1.96 | 1.61 | 1.18 |
| 31 | Procollagen-proline 4- | 838802 | AA457671 | 231 | 232 | 2.69 | 2.32 | 1.31 |
| | hydroxylase alpha 1 | | | | | | | |
| 32 | B-cell translocation gene 1, | 298268 | N70463 | 317 | 318 | 1.91 | 2.08 | 1.84 |
| 33 | SH3PX1 | 142139 | R69163 | 319 | 320 | 1.81 | 1.15 | 1.87 |
| 34 | Cyclin G2 | 823691 | AA489752 | 321 | 322 | 1.70 | 2.47 | n/d |
| 35 | BCL2/adenovirus E1B- | 783697 | AA446839 | 233 | 234 | 4.37 | 6.52 | n/d |
| | interacting protein 3 | | | | | | | |
| 36 | BCL2/adenovirus E1B- | 359982 | AA063521 | 233 | 234 | 3.09 | 5.00 | n/d |
| | interacting protein 3 | | | | | | | |
| 37 | NAG-5 protein | 460618 | AA700447 | 323 | 324 | 1.91 | n/d | n/d |
| 38 | Cytochrome P450 IB1 (dioxin- | 782760 | AA448157 | 325 | 326 | 1.93 | 2.25 | 0.93 |
| | inducible) | | | | | | | |
| 39 | Plasminogen activator | 244307 | N75719 | 235 | 236 | 1.81 | 2.78 | n/d |
| | inhibitor, type I | | | | | | | |
| 40 | Butyrate response factor 1 | 768299 | AA424743 | 327 | 328 | 2.59 | 2.69 | 1.88 |
| 41 | Butyrate response factor 1 | 413633 | AA723035 | 327 | 328 | 2.35 | 2.36 | 1.76 |
| 42 | p8 protein (candidate of | 80484 | T64469 | 329 | 330 | 4.13 | 4.19 | n/d |
| | metastasis 1) | | | | | | | |
| 43 | Fusin/CXCR4 | 79629 | T62491 | 331 | 332 | 2.16 | 1.97 | 1.07 |
| 44 | solute carrier family 16, | 1638893 | AI016779 | 333 | 334 | 1.96 | n/d | n/d |
| | member 6 | | | | | | | |
| 45 | solute carrier family 16, | 266389 | N21654 | 333 | 334 | 2.00 | n/d | n/d |
| | member 6 | | | | | | | |
| 46 | Proline-rich protein with | 857002 | AA669637 | 335 | 336 | 2.707 | 1.80 | 7.08 |
| | nuclear targeting signal (B4-2) | | | | | | | |
| 47 | Cox-2 | 845477 | AA644211 | 237 | 238 | n/d | 8.34 | 22.38 |
| 48 | Glycogen synthase 1 (muscle) | 45632 | H08446 | 275 | 276 | n/d | 2.28 | 1.15 |
| 49 | cDNA FLJ13700 fis, clone | 261246 | H98241 | 15 | 16 | 1.25 | 2.01 | 0.25 |
| | PLACE2000216, highly | | | | | | | |
| | similar to SPECTRIN BETA | | | | | | | |
| | CHAIN, BRAIN | | | | | | | |
| 50 | hypothetical protein FLJ20037 | 142944 | R71124 | 3 | 4 | 2.10 | 1.74 | n/d |
| 51 | hypothetical protein FLJ20037 | 451087 | AA704517 | 3 | 4 | 2.36 | 1.73 | n/d |
| 52 | hypothetical protein | 417863 | W88781 | 5 | 6 | 2.18 | 1.85 | 0.95 |
| | DKFZp434P0116 | | | | | | | |
| 53 | KIAA0212 | 854874 | AA630346 | 7 | 8 | 1.77 | 1.84 | 0.84 |
| 54 | KIAA0914 | 283301 | N51424 | 9 | 10 | 1.93 | 1.40 | n/d |
| 55 | hypothetical protein FLJ20281 | 244686 | N54297 | 11 | 12 | 2.13 | 2.05 | n/d |
| 56 | KIAA0876 | 809806 | AA454753 | 13 | 14 | 2.80 | 1.82 | n/d |
| 57 | DKFZP586G1122 protein | 950778 | AA608636 | 17 | 18 | 1.76 | 1.99 | 0.44 |
| 58 | Putative zinc finger protein | 377452 | AA055692 | 19 | 20 | 2.16 | n/d | n/d |
| | LOC55818 | | | | | | | |
| 59 | hypothetical protein PRO0823 | 194965 | R88734 | 21 | 22 | 1.89 | 1.47 | 1.02 |
| 60 | hypothetical protein PRO0823 | 1486194 | AA936866 | 21 | 22 | 2.17 | 1.31 | 0.46 |
| 61 | cDNA DKFZp586H0324 clone | 130276 | R21170 | 61 | 62 | 2.07 | 2.47 | n/d |
| | DKFZp586H0324 | | | | | | | |
| 62 | Clone 23785 | 376476 | AA041362 | 63 | 64 | 2.50 | 2.29 | n/d |
| 63 | Clone 23785 | 261834 | H98855 | 63 | 64 | 2.14 | 1.97 | 0.49 |
| 64 | cDNA DKFZp586E1624 | 284497 | N52362 | 65 | 66 | 1.95 | 1.09 | n/d |
| 65 | ESTs (UniGene annotated) | 139558 | R62339 | 79 | 80 | 1.73 | 1.75 | 1.69 |
| 66 | ESTs (UniGene annotated) | 897446 | AA489477 | 81 | 82 | 1.74 | 1.83 | n/d |
| 67 | ESTs (UniGene annotated) | 126458 | R06601 | 83 | 84 | 2.53 | 1.92 | 2.07 |
| 68 | ESTs (UniGene annotated) | 122982 | R00332 | 85 | 86 | 2.43 | 3.96 | n/d |
| 69 | ESTs (UniGene annotated) | 811808 | AA463469 | 87 | 88 | 1.79 | 1.31 | 1.24 |
| 70 | ESTs (UniGene annotated) | 203544 | H56028 | 89 | 90 | 3.67 | 3.63 | n/d |
| 71 | ESTs (UniGene annotated) | 714437 | AA293300 | 91 | 92 | 2.46 | 1.85 | 3.47 |
| 72 | ESTs | 810448 | AA457116 | 67 | 68 | 4.87 | 2.97 | 1.22 |
| 73 | ESTs | 207275 | H59618 | 97 | 98 | 2.61 | 1.24 | 1.04 |
| 74 | ESTs | 785928 | AA449703 | 99 | 100 | 1.45 | 1.84 | 0.57 |
| 75 | ESTs | 827204 | AA521311 | 101 | 102 | 1.80 | 1.55 | 1.27 |
| 76 | ESTs | 343695 | W69170 | 103 | 104 | 1.78 | 1.48 | 1.69 |
| 77 | ESTs | 39145 | R51835 | 105 | 106 | 1.49 | 1.72 | 1.04 |
| 78 | ESTs | 220608 | H87770 | 107 | 108 | 1.47 | 2.09 | 1.09 |
| 79 | ESTs | 142087 | R69248 | 109 | 110 | 1.57 | 1.70 | n/d |
| 80 | ESTs | 82171 | T68844 | 111 | 112 | 2.44 | 2.16 | 1.19 |
| 81 | ESTs | 795325 | AA454177 | 113 | 114 | 1.75 | 1.28 | n/d |
| 82 | ESTs | 366966 | AA026562 | 115 | 116 | 1.27 | 1.70 | n/d |
| 83 | ESTs | 84419 | T73780 | 117 | 118 | 1.43 | 2.22 | 1.07 |
| 84 | ESTs | 742611 | AA401496 | 119 | 120 | 3.63 | 3.75 | n/d |
| 85 | ESTs | 277611 | N49384 | 119 | 120 | 4.52 | 2.87 | n/d |
| 86 | ESTs | 823688 | AA489636 | 121 | 122 | 2.11 | n/d | n/d |
| 87 | ESTs | 781311 | AA446361 | 123 | 124 | 1.66 | 2.43 | n/d |
| 88 | ESTs | 1555201 | AA931411 | 125 | 126 | 1.89 | n/d | n/d |
| 89 | ESTs | 131563 | R24223 | 127 | 128 | 2.26 | n/d | n/d |
| 90 | EST (singleton) | 786657 | AA451886 | 137 | 138 | 2.44 | 2.01 | n/d |
| 91 | ESTs (ex-UniGene) | 126393 | R06520 | 139 | 140 | 1.59 | 1.81 | 0.86 |
| 92 | ESTs (ex UniGene) | 74054 | T48278 | 141 | 142 | 1.92 | 1.05 | n/d |
| Legend | | | | | | | | |
| The last 3 columns show mRNA expression as a ratio between the conditions being compared. Of these three columns | | | | | | | | |
| # the first two show expression in hypoxia relative to normoxia, done separately in resting macrophages or activated | | | | | | | | |
| # macrophages. The final column shows expression in activated macrophages relative to resting macrophages (both in normoxia) | | | | | | | | |
| # as a ratio. n/d = not determined due to low signal intensities. IMAGE IDand accession descride the exact identity | | | | | | | | |
| # of the arrayed clones and do not describe full length cDNA sequence database entries. | | | | | | | | |

[1006] TABLE 8
Genes induced by hypoxia (greater response in resting cells)

| | | | | | | RATIO | | |
|---|---|---|---|---|---|---|---|---|
| | | | | SEQ ID | | Hypoxia/Normoxia | | Activated/Resting |
| Row | TITLE | IMAGE ID | accession | protein | nucl | (resting) | (activated) | (normoxia) |
| 1 | Metallothionein 1H | 214162 | H77766 | 239 | 240 | 6.26 | 2.01 | 17.58 |
| 2 | Metallothionein 1L | 297392 | N80129 | 241 | 242 | 18.55 | 2.21 | 7.57 |
| 3 | metallothionein 1L | 1899230 | AI289110 | 241 | 242 | 5.89 | 1.70 | 9.63 |
| 4 | Metallothionein-IG | 202535 | H53340 | 243 | 244 | 12.07 | 2.36 | 21.28 |
| 5 | Metallothionein 1E (functional) | 1472735 | AA872383 | 245 | 246 | 10.16 | 2.04 | 4.66 |
| 6 | RNAhelicase-related protein/ | 245990 | N55459 | 337 | 338 | 6.41 | 1.99 | 14.16 |
| | metallotheionein1F | | | | | | | |
| 7 | RNAhelicase-related protein/ | 78353 | T56281 | 337 | 338 | 5.19 | 1.54 | 12.00 |
| | metallotheionein1F | | | | | | | |
| 8 | Solute carrier family 2, member 3 | 753467 | AA406551 | 247 | 248 | 7.67 | 4.69 | 4.78 |
| 9 | Hexokinase 2 | 1637282 | AI005515 | 249 | 250 | 7.32 | 3.27 | 0.62 |
| 10 | DKFZp434E1723 clone | 1593887 | AA987423 | 69 | 70 | 2.04 | 1.34 | 1.49 |
| | DKFZp434E1723 | | | | | | | |
| 11 | CytochromeP450, subfamilyXXVI | 1761925 | AI222585 | 339 | 340 | 2.16 | 0.72 | 2.92 |
| | IB, polypept1 | | | | | | | |
| 12 | Interleukin 8 | 549933 | AA102526 | 251 | 252 | 5.65 | 0.86 | 382.80 |
| 13 | SHB adaptor protein | 768362 | AA495786 | 341 | 342 | 1.87 | 0.84 | 0.39 |
| 14 | ESTs | 130835 | R22252 | 129 | 130 | 1.97 | 0.93 | 0.83 |
| Legend to Table 8 | | | | | | | | |
| The last 3 columns show mRNA expression as a ratio between the conditions being compared. Of these three columns | | | | | | | | |
| # the first two show expression in hypoxia relative to normoxia, done separately in resting macrophages or activated | | | | | | | | |
| # macrophages. The final column shows expression in activated macrophages relative to resting macrophages (both in normoxia) | | | | | | | | |
| # as a ratio. n/d = not determined due to low signal intensities. IMAGE ID and accession describe the exact identity | | | | | | | | |
| # of the arrayed clones and do not describe full length cDNA sequence database entries. | | | | | | | | |

[1007] TABLE 9
Genes induced by hypoxia (greater response in activated cells)

| | | | | | RATIO | | |
|---|---|---|---|---|---|---|---|
| | IMAGE | | SEQ ID | | Hypoxia/Normoxia | | Activated/Resting |
| TITLE | ID | accession | protein | nucleotide | (resting) | (activated) | (normoxia) |
| Papillomavirus regulatory | 744983 | AA625924 | 343 | 344 | 3.36 | 8.10 | 0.22 |
| factor (PRF-1) | | | | | | | |
| CDNA FLJ11041 fis, clone | 140301 | R66924 | 71 | 72 | 1.46 | 3.19 | 2.50 |
| PLACE1004405 | | | | | | | |
| ESTs (ex-UniGene) | 139250 | R68736 | 143 | 144 | 1.01 | 2.18 | 1.68 |
| Legend | | | | | | | |
| The last 3 columns show mRNA expression as a ratio between the conditions being compared. Of these three columns | | | | | | | |
| # the first two show ecpression in hypoxia relative to normoxia, done separately in resting macrophages or activated | | | | | | | |
| # macrophages.The final column shows expression in activated macrophages relative to resting macrophages (both in normoxia) | | | | | | | |
| # as a ratio. n/d = not determined due to low signal intensities. IMAGE ID and accession describe the exact identity | | | | | | | |
| # of the arrayed clones and do not describe full length cDNA sequence database entries. | | | | | | | |

[1008] TABLE 10
Genes repressed by hypoxia (greater response in activated cells)

| | | | | | | RATIO | | |
|---|---|---|---|---|---|---|---|---|
| | | | | SEQ ID | | Hypoxia/Normoxia | | Activated/Resting |
| row | TITLE | IMAGE ID | accession | protein | nucl | (resting) | (activated) | (normoxia) |
| 1 | Maf-related leucine zipper | 77193 | T50121 | 457 | 458 | 1.18 | 0.48 | 2.39 |
| | homolog | | | | | | | |
| 2 | Alpha-2-macroglobulin | 44180 | H06516 | 405 | 406 | 1.11 | 0.54 | 1.98 |
| 3 | KIAA0014 | 725927 | AA292382 | 51 | 52 | 1.10 | 0.65 | 25.00 |
| 4 | ESTs | 178805 | H49601 | 203 | 204 | 1.04 | 0.49 | 1.62 |
| 5 | dynein, cytoplasmic, light | 811870 | AA454959 | 459 | 460 | 1.03 | 0.42 | 3.31 |
| | intermediate polypeptide 2 | | | | | | | |
| 6 | Heterochromatin-like protein 1 | 343490 | W69106 | 461 | 462 | 1.01 | 0.60 | 3.21 |
| 7 | Monocyte chemotactic protein 3 | 485989 | AA040170 | 463 | 464 | 0.89 | 0.52 | 59.62 |
| 8 | Fatty-acid-Coenzyme A ligase, | 82734 | T73556 | 465 | 466 | 0.88 | 0.52 | 6.85 |
| | long-chain 2 | | | | | | | |
| 9 | Fatty-acid-Coenzyme A ligase, | 2014138 | AI361530 | 465 | 466 | 0.72 | 0.46 | 3.97 |
| | long-chain 2 | | | | | | | |
| 10 | Programmed cell death 5/ | 502369 | AA156940 | 467 | 468 | 0.78 | 0.59 | 1.57 |
| | TFAR19 | | | | | | | |
| 11 | cDNA FLJ14028 fis, clone | 366156 | AA062814 | 145 | 146 | 0.75 | 0.55 | 1.74 |
| | HEMBA1003838 | | | | | | | |
| 12 | Small inducible cytokine A3 | 153355 | R47893 | 469 | 470 | 0.69 | 0.29 | 8.74 |
| 13 | Cytochrome c oxidase subunit | 42993 | R59927 | 471 | 472 | 0.72 | 0.54 | 1.98 |
| | VIc | | | | | | | |
| 14 | NASP histone-binding prot. | 845415 | AA644128 | 473 | 474 | 0.64 | 0.38 | 1.64 |
| 15 | hypothetical protein HSPC196 | 144902 | R78498 | 53 | 54 | 0.63 | 0.48 | 1.62 |
| 16 | Ecotropic viral integration site | 231675 | H93149 | 475 | 476 | 0.63 | 0.35 | 1.51 |
| | 2A | | | | | | | |
| 17 | Sjogren syndrome antigen B | 49970 | H29484 | 477 | 478 | 0.53 | 0.32 | 7.86 |
| 18 | Macrophage inflammatory | 205633 | H62985 | 407 | 408 | 0.52 | 0.28 | 12.73 |
| | protein 1b | | | | | | | |
| 19 | Monocyte chemotactic protein 1 | 768561 | AA425102 | 395 | 396 | 0.46 | 0.11 | 213.89 |
| 20 | Monocyte chemotactic protein 2 | 1911099 | AI268937 | 479 | 480 | undetectable | 0.26 | 423.31 |
| 21 | Endothelin 1 | 47359 | H11003 | 397 | 398 | undetectable | 0.56 | 14.29 |
| 22 | GRO2/macrophage | 153340 | R50407 | 481 | 482 | undetectable | 0.66 | 12.16 |
| | inflammatory protein 2a | | | | | | | |
| 23 | Small nuclear ribonucleoprotein | 47542 | H16454 | 483 | 484 | undetectable | 0.22 | 11.01 |
| | SM D 1 | | | | | | | |
| 24 | hypothetical protein FLJ11296 | 491460 | AA150443 | 55 | 56 | undetectable | 0.51 | 8.96 |
| 25 | GRO1/macrophage | 324437 | W46900 | 485 | 486 | undetectable | 0.48 | 15.29 |
| | inflammatory protein 2 | | | | | | | |
| | precursor | | | | | | | |
| 26 | GRO1/macrophage | 323238 | W42723 | 485 | 486 | undetectable | 0.40 | 7.92 |
| | inflammatory protein 2 | | | | | | | |
| | precursor | | | | | | | |
| 27 | Lymphocyte adhesion molecule | 149910 | H00756 | 487 | 488 | undetectable | 0.47 | 4.92 |
| | 1 | | | | | | | |
| 28 | Sex hormone-binding globulin | 82871 | T69346 | 409 | 410 | undetectable | 0.36 | 3.57 |
| 29 | ESTs | 898045 | AA598952 | 205 | 206 | undetectable | 0.53 | 2.37 |
| 30 | hypothetical protein bA395L14 | 842794 | AA486203 | 57 | 58 | undetectable | 0.45 | n/d |
| Legend to Table 10 | | | | | | | | |
| The last 3 columns show mRNA expression as a ratio between the conditions being compared. Of these three columns | | | | | | | | |
| # the first two show expression in hypoxia relative to normoxia, done separately in resting macrophages or activated | | | | | | | | |
| # macrophages. The final column shows expression in activated macrophages relative to resting macrophages (both in normoxia) | | | | | | | | |
| # as a ratio. n/d = not determined due to low signal intensities. IMAGE ID and accession descride the exact identity | | | | | | | | |
| # of the arrayed clones and do not describe full length cDNA sequence database entries. | | | | | | | | |

[1009] TABLE 11
Other genes repressed by hypoxia in macrophages

| | | | | | | RATIO | | |
|---|---|---|---|---|---|---|---|---|
| | | | | | | | | Activated/ |
| | | | | SEQ ID | | Hypoxia/Normoxia | | Resting |
| Row | TITLE | IMAGE ID | accession | PROTEIN | NUCL | (resting) | (activated) | (normoxia) |
| 1 | Annexin AI | 208718 | H63077 | 401 | 402 | 0.86 | 0.49 | 1.27 |
| 2 | ATP-binding cassette, sub-family E | 1593311 | AI002355 | 411 | 412 | 0.62 | 0.51 | 0.79 |
| | (OABP), 1 | | | | | | | |
| 3 | ESTs | 855583 | AA664228 | 165 | 166 | 0.61 | 0.52 | 0.73 |
| 4 | Chaperonin/Tcp zeta 1 | 45233 | H07880 | 413 | 414 | 0.59 | 0.55 | 1.27 |
| 5 | Chaperonin TCP1, subunit 6A zeta 1 | 45233 | H07880 | 413 | 414 | 0.72 | 0.52 | 1.00 |
| 6 | Colony stimulating factor 1 | 73527 | T55558 | 415 | 416 | 0.44 | 0.38 | 0.44 |
| | (macrophage) | | | | | | | |
| 7 | Colony stimulating factor 1 | 1475574 | AA878257 | 415 | 416 | 0.46 | 0.38 | 0.30 |
| | (macrophage) | | | | | | | |
| 8 | Dendritic cell protein (GA17) | 563634 | AA101348 | 417 | 418 | 0.59 | 0.53 | 0.97 |
| 9 | G protein-coupled receptor 44 | 810403 | AA464202 | 419 | 420 | 0.55 | 0.57 | 0.90 |
| 10 | Heat shock 70kD protein 4 | 856567 | AA633656 | 399 | 400 | 0.55 | n/d | n/d |
| 11 | Keratin 6A | 366481 | AA026418 | 421 | 422 | 0.53 | 1.21 | 0.25 |
| 12 | lymphocyte adaptor protein | 294196 | N71394 | 423 | 424 | 0.67 | 0.50 | 0.26 |
| 13 | Neuro-oncological ventral antigen 1 | 2015354 | AI362062 | 425 | 426 | 0.45 | 0.38 | 0.65 |
| 14 | N-SMase/FAN | 376644 | AA046107 | 427 | 428 | 0.59 | 0.86 | 0.18 |
| 15 | p67 myc protein | 812965 | AA464600 | 403 | 404 | 0.66 | 0.59 | 1.14 |
| 16 | Peptidylprolyl isomerase F | 774726 | AA442081 | 429 | 430 | 0.82 | 0.44 | n/d |
| | (cyclophilin F) | | | | | | | |
| 17 | PLECKSTRIN | 823779 | AA490267 | 431 | 432 | 0.76 | 0.52 | 1.30 |
| 18 | High affinity immunoglobulin | 199185 | R95749 | 433 | 434 | 0.65 | 0.59 | 1.22 |
| | epsilon receptor beta subunit | | | | | | | |
| 19 | High affinity immunoglobulin | 79576 | T62849 | 433 | 434 | 0.64 | 0.58 | 1.20 |
| | epsilon receptor beta subunit | | | | | | | |
| 20 | Ribosomal protein L44 | 884842 | AA669359 | 435 | 436 | 0.73 | 0.50 | 1.36 |
| 21 | Solute carrier family 6 No 1 | 177967 | H46254 | 437 | 438 | 0.62 | 0.54 | 1.38 |
| 22 | Synaptopodin | 178792 | H49443 | 439 | 440 | 0.54 | 0.56 | 1.24 |
| 23 | TERA protein | 1521977 | AA906997 | 441 | 442 | 0.44 | 0.34 | 0.46 |
| 24 | TGF beta-stimulated protein TSC-22 | 868630 | AA664389 | 443 | 444 | 0.56 | 0.72 | 0.83 |
| 25 | Tubulin, beta, 2 | 1492104 | AA888148 | 445 | 446 | 0.53 | 0.64 | 1.33 |
| 26 | Calgranulin A | 562729 | AA086471 | 447 | 448 | 0.57 | 0.65 | 16.86 |
| 27 | Replication factor C (145 KDa) | 214537 | H73714 | 449 | 450 | 0.66 | 0.50 | 2.80 |
| 28 | Signal recognition particle 19 kD | 754998 | AA411407 | 451 | 452 | 0.63 | 0.49 | 2.77 |
| | protein | | | | | | | |
| 29 | Nucleoside phosphorylase | 769890 | AA430382 | 393 | 394 | 0.50 | 0.79 | 2.75 |
| 30 | Transcription factor SUPT3H | 1606865 | AA996042 | 453 | 454 | 0.50 | 0.47 | 2.64 |
| 31 | Proteasome component C9 | 399536 | AA733040 | 455 | 456 | 0.64 | 0.58 | 2.09 |
| 32 | hypothetical nuclear factor SBBI22 | 868119 | AA634213 | 35 | 36 | 0.75 | 0.50 | 0.73 |
| 33 | DKFZP434I116 protein | 207379 | H58884 | 37 | 38 | 0.52 | 0.43 | 1.04 |
| 34 | hypothetical prot. FLJ10206 | 487921 | AA045286 | 39 | 40 | 0.61 | 1.00 | 0.24 |
| 35 | hypothetical protein FLJ10815 | 1506046 | AA905628 | 41 | 42 | 0.92 | 0.55 | 0.88 |
| 36 | hypothetical protein FLJ11100 | 811590 | AA454607 | 43 | 44 | 0.56 | 0.47 | 1.17 |
| 37 | hypothetical protein FLJ2064 | 868161 | AA633831 | 45 | 46 | 0.81 | 0.47 | 0.85 |
| 38 | hypothetical protein HSPC111 | 825695 | AA504814 | 47 | 48 | 0.43 | 0.44 | 1.05 |
| 39 | hypothetical protein LOC51251 | 379941 | AA778116 | 49 | 50 | 0.56 | 0.55 | 1.06 |
| 40 | hypothetical protein LOC51251 | 770997 | AA427715 | 49 | 50 | 0.56 | 0.74 | 1.47 |
| 41 | cDNA FLJ13016 fis, clone | 77483 | T58743 | 59 | 60 | 0.58 | 0.54 | 1.55 |
| | NT2RP3000624 | | | | | | | |
| 42 | DKFZp564D016 (clone | 824665 | AA482278 | 147 | 148 | 0.50 | n/d | n/d |
| | DKFZp564D016 | | | | | | | |
| 43 | cDNA FLJ11302 fis, clone | 108351 | T70612 | 149 | 150 | 0.75 | 0.49 | 1.36 |
| | PLACE1009971 | | | | | | | |
| 44 | NEDO FLJ10309 fis cl | 810026 | AA455267 | 151 | 152 | 0.57 | 1.20 | 0.28 |
| | NT2RM2000287 | | | | | | | |
| 45 | Sequence from clone RP11-394O2 | 122147 | T98503 | 153 | 154 | 0.51 | 0.99 | n/d |
| | on ch 20 | | | | | | | |
| 46 | ESTs (UniGene annotated) | 731255 | AA420992 | 155 | 156 | 0.67 | 0.53 | 0.86 |
| 47 | ESTs (UniGene annotated) | 434182 | AA693797 | 157 | 158 | 0.46 | 0.37 | 0.77 |
| 48 | ESTs (UniGene annotated) | 788415 | AA456437 | 159 | 160 | 0.50 | 0.52 | 0.89 |
| 49 | ESTs (UniGene annotated) | 49879 | H28725 | 159 | 160 | 0.35 | 0.38 | n/d |
| 50 | ESTs (UniGene annotated) | 770954 | AA429367 | 161 | 162 | 0.64 | 0.74 | 0.82 |
| 51 | ESTs (UniGene annotated) | 770935 | AA434382 | 163 | 164 | 0.55 | 0.98 | 0.51 |
| 52 | ESTs | 34626 | R44397 | 167 | 168 | 0.92 | 0.61 | 1.35 |
| 53 | ESTs | 1534589 | AA923509 | 169 | 170 | 0.70 | 0.48 | 0.72 |
| 54 | ESTs | 417223 | W87747 | 171 | 172 | 0.53 | 0.37 | 0.97 |
| 55 | ESTs | 854752 | AA630167 | 215 | 216 | 0.64 | 0.54 | 0.87 |
| 56 | ESTs | 1569263 | AA973568 | 173 | 174 | 0.52 | 0.45 | 0.62 |
| 57 | ESTs | 869440 | AA679939 | 213 | 214 | 0.60 | 0.53 | 0.78 |
| 58 | ESTs | 123065 | T98529 | 175 | 176 | 0.62 | 0.55 | 0.94 |
| 59 | ESTs | 364468 | AA022679 | 177 | 178 | 0.59 | 0.54 | 1.30 |
| 60 | ESTs | 50635 | H17921 | 179 | 180 | 0.45 | 0.43 | 0.94 |
| 61 | ESTs | 123858 | R00766 | 181 | 182 | 0.50 | 0.50 | 0.75 |
| 62 | ESTs | 415195 | W91958 | 183 | 184 | 0.54 | 0.59 | 1.28 |
| 63 | ESTs | 138865 | R63694 | 185 | 186 | 0.56 | 0.66 | 1.32 |
| 64 | ESTs | 773308 | AA425386 | 187 | 188 | 0.51 | 0.61 | 0.63 |
| 65 | ESTs | 1505857 | AA909912 | 189 | 190 | 0.46 | 0.78 | 0.83 |
| 66 | ESTs | 122728 | T99032 | 191 | 192 | 0.49 | 0.39 | 0.42 |
| 67 | ESTs | 202154 | H52503 | 193 | 194 | 0.35 | 0.42 | 0.35 |
| 68 | ESTs | 502634 | AA127017 | 195 | 196 | 0.52 | 0.88 | 0.54 |
| 69 | ESTs | 23005 | R38647 | 197 | 198 | 0.51 | n/d | n/d |
| 70 | ESTs | 22500 | T87233 | 199 | 200 | 0.55 | n/d | n/d |
| 71 | ESTs | 587398 | AA130351 | 201 | 202 | 0.52 | n/d | n/d |
| 72 | ESTs (ex-UniGene) | 1610469 | AA991868 | 207 | 208 | 0.54 | 0.53 | 0.41 |
| 73 | ESTs (ex-UniGene) | 81331 | T60111 | 209 | 210 | 0.92 | 0.46 | 0.24 |
| 74 | ESTs (ex-UniGene) | 1425266 | AA897090 | 211 | 212 | 0.55 | 0.75 | 0.19 |
| Legend | | | | | | | | |
| The last 3 columns show mRNA expression as a ratio between the conditions being compared. Of these three columns | | | | | | | | |
| # the first two show expression in hypoxia relative to normoxia, done separately in resting macrophages or activated | | | | | | | | |
| # macrophages. The final column shows expression in activated macrophages relative to resting macrophages (both in normoxia) | | | | | | | | |
| # as a ratio. n/d = not determined due to low signal intensities. IMAGE ID and accession descride the exact identity | | | | | | | | |
| # of the arrayed clones and do not describe full length cDNA sequence database entries. | | | | | | | | |

[1010] TABLE 12

| | | | #1 | #1 | | #2 | #2 | | #3 | #3 | | #4 | #4 | | #5 | | #6 |
|---|---|---|---|---|---|---|---|---|---|---|---|---|---|---|---|---|---|
| Seq | | #1 | HY | HY | #2 | HY | HY | #3 | HY | HY | #4 | HY | HY | #5 | HY | #6 | HY |
| ID | Clone | NO | 6 hr | 18 hr | NO | 6 hr | 18 hr | NO | 6 hr | 18 hr | NO | 6 hr | 18 hr | NO | 6 hr | NO | 6 hr |
| 2 | p1F12 | 1.26 | 0.83 | 1.12 | 2.59 | 2.41 | 2.84 | 1.36 | 1.42 | 1.75 | 0.41 | 0.35 | 0.41 | 0.70 | 1.59 | 0.48 | 0.46 |
| 4 | p1F2 | 1.39 | 2.37 | 1.74 | 1.18 | 1.78 | 1.62 | 0.74 | 0.67 | 0.50 | 0.80 | 1.12 | 1.24 | 1.30 | 1.98 | 0.94 | 1.38 |
| 6 | p1F10 | 1.41 | 1.07 | 0.83 | 1.57 | 1.71 | 1.71 | 1.60 | 1.92 | 1.67 | 0.79 | 0.66 | 0.56 | 0.69 | 1.48 | 1.17 | 0.94 |
| 8 | p1F19 | 0.54 | 0.53 | 0.78 | 0.99 | 1.04 | 1.25 | 1.18 | 1.23 | 1.22 | 0.44 | 0.54 | 0.72 | 0.37 | 0.29 | 0.94 | 0.67 |
| 10 | p1F8 | 0.63 | 1.34 | 1.17 | 0.87 | 1.04 | 1.04 | 0.53 | 1.07 | 1.09 | 0.50 | 1.20 | 1.96 | 0.32 | 0.99 | 0.74 | 1.21 |
| 12 | p1F5 | 1.41 | 1.04 | 0.98 | 1.12 | 1.63 | 1.35 | 2.09 | 2.40 | 1.91 | 0.78 | 0.65 | 0.88 | 0.81 | 1.67 | 0.83 | 0.75 |
| 14 | p1F18 | 1.34 | 0.69 | 1.02 | 1.43 | 1.65 | 1.90 | 1.98 | 1.62 | 2.17 | 0.74 | 0.55 | 0.72 | 0.40 | 0.57 | 0.74 | 0.70 |
| 16 | p1F7 | 0.69 | 0.35 | 0.75 | 1.83 | 1.35 | 1.67 | 1.99 | 5.27 | 2.95 | 1.05 | 0.91 | 0.71 | 0.47 | 0.47 | 0.05 | 0.08 |
| 18 | p1F21 | 0.68 | 0.58 | 0.50 | 0.85 | 0.85 | 0.74 | 0.80 | 0.66 | 0.52 | 0.61 | 0.66 | 0.63 | 0.27 | 0.59 | 2.16 | 5.39 |
| 20 | p1F9 | 0.36 | 0.47 | 0.86 | 0.95 | 2.47 | 0.09 | 3.60 | 2.70 | 3.01 | 0.43 | 0.93 | 1.02 | 0.23 | 0.54 | 0.29 | 0.62 |
| 22 | p1E13 | 1.76 | 1.30 | 0.95 | 1.04 | 1.78 | 1.01 | 0.59 | 0.66 | 0.55 | 0.89 | 0.65 | 0.72 | 1.04 | 1.50 | 3.73 | 3.36 |
| 24 | p1D1 | 0.88 | 1.98 | 5.49 | 1.47 | 2.03 | 3.59 | 1.32 | 2.69 | 2.05 | 0.63 | 2.45 | 5.51 | 0.94 | 1.79 | 0.10 | 0.33 |
| 24 | p1D2 | 1.03 | 0.99 | 3.89 | 1.76 | 3.50 | 4.79 | 0.73 | 1.87 | 1.78 | 1.07 | 2.22 | 4.16 | 0.68 | 1.01 | 0.13 | 0.23 |
| 26 | p1D4 | 0.41 | 1.88 | 1.95 | 0.83 | 1.80 | 2.19 | 1.57 | 1.80 | 1.54 | 0.42 | 1.42 | 1.50 | 0.49 | 2.36 | 0.31 | 0.39 |
| 28 | p1D9 | 1.16 | 0.13 | 0.93 | 1.52 | 0.80 | 0.85 | 4.04 | 4.86 | 2.60 | 1.23 | 1.45 | 1.28 | 0.65 | 1.14 | 1.37 | 0.94 |
| 30 | p1D12 | 5.56 | 4.42 | 3.24 | 0.62 | 3.70 | 1.69 | 0.54 | 0.77 | 0.78 | 1.09 | 1.13 | 0.96 | 1.36 | 1.03 | 3.70 | 4.01 |
| 32 | p1D15 | 0.81 | 0.54 | 1.48 | 1.10 | 1.39 | 1.05 | 0.74 | 0.86 | 0.69 | 0.77 | 0.90 | 0.81 | 0.38 | 0.73 | 0.54 | 0.65 |
| 34 | p1D16 | 0.44 | 1.99 | 0.84 | 1.11 | 1.29 | 1.22 | 2.07 | 2.43 | 1.61 | 0.42 | 0.78 | 1.32 | 0.61 | 1.18 | 0.66 | 0.98 |
| 36 | p1J13 | 1.15 | 0.62 | 0.54 | 1.24 | 0.91 | 0.84 | 1.94 | 1.73 | 1.66 | 1.08 | 0.75 | 0.50 | 0.66 | 0.69 | 0.51 | 0.39 |
| 38 | p1I22 | 0.72 | 0.65 | 1.20 | 1.97 | 1.77 | 1.49 | 1.57 | 1.60 | 1.75 | 0.95 | 0.90 | 0.86 | 0.95 | 1.59 | 1.10 | 0.74 |
| 40 | p1J6 | 0.91 | 0.96 | 1.04 | 1.08 | 0.99 | 0.96 | 0.97 | 1.21 | 0.87 | 0.99 | 1.04 | 1.07 | 1.18 | 1.60 | 1.10 | 1.29 |
| 42 | p1I5 | 3.02 | 1.24 | 2.56 | 1.56 | 3.17 | 1.47 | 1.46 | 1.76 | 1.21 | 1.16 | 1.32 | 0.93 | 0.54 | 0.88 | 0.73 | 1.07 |
| 44 | p1I13 | 8.65 | 6.65 | 3.11 | 0.71 | 3.20 | 0.89 | 0.96 | 1.11 | 0.84 | 1.92 | 1.66 | 1.08 | 1.25 | 0.71 | 2.09 | 2.43 |
| 46 | p1I17 | 0.88 | 0.55 | 0.63 | 2.03 | 1.13 | 1.38 | 1.93 | 4.01 | 2.52 | 1.16 | 0.92 | 0.88 | 0.23 | 0.32 | 0.67 | 0.51 |
| 48 | p1I15 | 2.06 | 1.31 | 0.49 | 1.19 | 0.53 | 0.43 | 1.88 | 1.66 | 0.97 | 1.47 | 0.74 | 0.91 | 1.24 | 1.86 | 0.61 | 0.34 |
| 50 | p1I7 | 0.79 | 0.56 | 0.64 | 1.20 | 0.69 | 0.80 | 2.13 | 3.28 | 1.74 | 0.91 | 0.96 | 0.99 | 0.47 | 0.65 | 0.57 | 0.34 |
| 54 | p1I4 | 1.26 | 0.51 | 0.35 | 1.21 | 0.95 | 0.47 | 1.04 | 1.45 | 0.93 | 0.90 | 0.43 | 0.29 | 0.73 | 0.82 | 1.40 | 1.18 |
| 56 | p1I8 | 4.53 | 3.14 | 2.83 | 1.51 | 2.71 | 1.50 | 0.89 | 1.04 | 0.76 | 1.24 | 1.09 | 1.00 | 0.65 | 1.04 | 0.93 | 1.26 |
| 58 | p1I16 | 0.70 | 0.51 | 0.41 | 2.31 | 1.46 | 1.60 | 3.37 | 2.91 | 2.73 | 0.51 | 0.51 | 0.43 | 0.76 | 0.64 | 1.03 | 0.82 |
| 60 | p1I11 | 0.63 | 0.62 | 0.34 | 1.64 | 1.36 | 1.19 | 2.75 | 1.62 | 1.38 | 0.63 | 0.37 | 0.40 | 0.59 | 0.84 | 0.56 | 0.51 |
| 62 | p1E8 | 0.67 | 0.47 | 0.71 | 1.41 | 1.14 | 1.22 | 1.59 | 3.29 | 1.99 | 1.08 | 1.07 | 0.95 | 0.25 | 0.40 | 0.52 | 0.48 |
| 64 | p1E18 | 1.26 | 1.07 | 0.72 | 1.45 | 2.07 | 1.10 | 0.77 | 0.93 | 0.73 | 0.93 | 0.71 | 0.80 | 0.57 | 1.23 | 6.36 | 5.38 |
| 66 | p1E16 | 0.84 | 0.56 | 1.06 | 0.96 | 0.95 | 0.88 | 1.90 | 6.76 | 5.00 | 2.43 | 2.67 | 2.25 | 0.32 | 0.49 | 0.62 | 0.81 |
| 68 | p1D5 | 1.71 | 1.21 | 1.40 | 1.58 | 1.81 | 1.66 | 2.13 | 1.93 | 2.05 | 0.84 | 0.79 | 0.81 | 0.78 | 0.90 | 0.75 | 0.80 |
| 68 | p1D6 | 0.24 | 1.42 | 2.51 | 0.28 | 0.61 | 0.93 | 1.77 | 1.57 | 1.85 | 0.25 | 1.35 | 2.82 | 0.34 | 0.52 | 0.61 | 1.49 |
| 70 | p1E12 | 0.54 | 0.41 | 0.62 | 0.98 | 1.29 | 0.67 | 0.98 | 1.47 | 1.13 | 0.83 | 0.84 | 0.87 | 1.11 | 1.17 | 0.59 | 1.01 |
| 72 | p1E10 | 1.09 | 0.63 | 1.03 | 4.31 | 3.17 | 5.08 | 2.27 | 4.17 | 3.76 | 1.03 | 1.01 | 1.06 | 0.75 | 0.74 | 0.74 | 0.79 |
| 74 | p1C21 | 3.92 | 2.75 | 2.31 | 0.93 | 2.33 | 0.92 | 1.81 | 2.27 | 1.45 | 0.91 | 0.96 | 0.95 | 0.41 | 0.33 | 2.10 | 2.68 |
| 76 | p1D10 | 0.45 | 0.88 | 1.49 | 0.60 | 1.80 | 1.63 | 1.34 | 2.61 | 2.82 | 0.34 | 1.48 | 1.83 | 0.65 | 1.21 | 0.36 | 0.49 |
| 78 | p1D13 | 2.93 | 1.83 | 2.94 | 0.80 | 3.69 | 1.10 | 1.51 | 3.28 | 3.02 | 0.89 | 1.59 | 1.30 | 0.67 | 0.64 | 0.50 | 0.75 |
| 80 | p1E9 | 1.54 | 0.89 | 1.48 | 1.18 | 1.80 | 1.53 | 0.68 | 0.82 | 0.60 | 0.60 | 0.64 | 0.73 | 0.92 | 1.62 | 4.20 | 3.97 |
| 82 | p1F1 | 0.58 | 0.33 | 0.52 | 1.42 | 1.19 | 1.14 | 1.64 | 1.70 | 1.49 | 0.95 | 0.63 | 0.54 | 0.37 | 0.50 | 0.62 | 0.61 |
| 84 | p1E7 | 1.20 | 1.29 | 1.63 | 0.12 | 0.18 | 0.22 | 1.40 | 1.03 | 0.71 | 2.36 | 2.17 | 2.85 | 4.89 | 6.75 | 0.08 | 1.07 |
| 86 | p1E6 | 1.36 | 1.09 | 1.01 | 0.79 | 0.92 | 1.04 | 0.79 | 1.35 | 1.04 | 1.32 | 1.87 | 1.63 | 3.25 | 5.97 | 0.34 | 0.74 |
| 88 | p2B1 | 1.51 | 0.97 | 0.80 | 2.39 | 2.31 | 2.25 | 1.06 | 1.22 | 1.18 | 1.10 | 0.77 | 0.51 | 0.72 | 1.19 | 0.60 | 0.50 |
| 90 | p1D14 | 0.67 | 0.82 | 1.64 | 0.60 | 3.42 | 1.80 | 1.78 | 5.24 | 3.57 | 1.07 | 2.33 | 2.11 | 0.68 | 0.67 | 0.29 | 0.74 |
| 92 | p1D17 | 6.32 | 5.30 | 3.77 | 0.46 | 3.08 | 1.47 | 0.41 | 0.60 | 0.43 | 1.05 | 0.92 | 0.91 | 1.17 | 1.13 | 3.73 | 3.80 |
| 92 | p1P14 | 0.43 | 0.66 | 0.74 | 1.22 | 1.60 | 1.14 | 1.00 | 1.53 | 1.32 | 0.49 | 0.73 | 1.15 | 0.43 | 0.69 | 0.21 | 0.45 |
| 94 | p1C24 | 0.92 | 0.88 | 0.53 | 1.76 | 1.65 | 1.37 | 1.08 | 1.09 | 0.89 | 1.23 | 1.07 | 0.85 | 0.68 | 1.28 | 0.60 | 0.77 |
| 96 | p1D3 | 0.62 | 1.56 | 1.13 | 1.83 | 0.85 | 0.73 | 3.09 | 4.01 | 3.43 | 0.29 | 0.52 | 0.71 | 0.15 | 0.28 | 5.72 | 5.67 |
| 98 | p1E14 | 1.09 | 1.92 | 0.89 | 1.93 | 1.46 | 0.96 | 1.23 | 1.58 | 0.96 | 0.88 | 0.71 | 1.26 | 0.87 | 1.68 | 0.67 | 0.89 |
| 100 | p1E20 | 0.63 | 0.61 | 1.12 | 1.47 | 1.34 | 0.99 | 1.45 | 1.94 | 1.49 | 0.68 | 0.88 | 0.98 | 0.19 | 0.34 | 0.36 | 0.43 |
| 102 | p2A24 | 1.21 | 0.65 | 0.67 | 2.42 | 2.21 | 2.48 | 2.35 | 3.05 | 2.59 | 1.10 | 0.76 | 0.68 | 0.68 | 0.91 | 0.28 | 0.22 |
| 104 | p1E17 | 0.94 | 0.56 | 0.99 | 0.95 | 1.55 | 0.96 | 1.93 | 2.41 | 2.37 | 0.89 | 0.88 | 0.80 | 0.53 | 0.73 | 0.84 | 1.15 |
| 106 | p1E19 | 0.79 | 0.65 | 0.62 | 2.64 | 2.37 | 2.99 | 2.10 | 1.61 | 1.77 | 0.61 | 0.40 | 0.64 | 0.42 | 0.89 | 0.68 | 0.76 |
| 108 | p1E15 | 2.82 | 1.46 | 2.04 | 1.42 | 2.65 | 1.00 | 0.92 | 1.10 | 0.78 | 1.83 | 2.00 | 1.73 | 0.82 | 0.72 | 1.21 | 1.35 |
| 110 | p1E11 | 1.36 | 1.12 | 0.87 | 2.09 | 2.86 | 3.03 | 0.74 | 0.91 | 0.88 | 0.89 | 0.59 | 0.79 | 0.77 | 2.09 | 2.76 | 2.97 |
| 112 | p1E23 | 1.19 | 0.65 | 1.55 | 1.24 | 2.11 | 1.42 | 0.75 | 1.15 | 1.02 | 0.86 | 1.09 | 1.09 | 0.35 | 0.40 | 0.31 | 0.36 |
| 114 | p1E21 | 0.82 | 0.52 | 0.85 | 2.08 | 2.28 | 2.04 | 2.14 | 2.04 | 2.27 | 0.74 | 0.49 | 0.79 | 0.51 | 1.04 | 0.48 | 0.67 |
| 116 | p1D23 | 0.95 | 0.47 | 0.68 | 1.21 | 1.62 | 1.30 | 0.99 | 1.17 | 1.10 | 1.39 | 1.20 | 1.05 | 0.35 | 0.49 | 0.28 | 0.27 |
| 118 | p1D24 | 0.98 | 0.71 | 1.39 | 1.55 | 1.98 | 2.16 | 1.18 | 1.47 | 1.01 | 0.74 | 0.49 | 0.67 | 1.53 | 1.94 | 0.90 | 0.98 |
| 120 | p1D22 | 0.70 | 0.89 | 1.98 | 0.89 | 2.66 | 2.13 | 0.71 | 1.40 | 1.45 | 0.72 | 1.61 | 2.10 | 0.26 | 0.65 | 0.22 | 0.96 |
| 122 | p1E2 | 3.39 | 1.91 | 1.92 | 1.56 | 1.78 | 1.65 | 1.11 | 1.09 | 1.03 | 3.44 | 3.32 | 1.96 | 0.68 | 0.78 | 0.76 | 0.73 |
| 124 | p1E1 | 2.91 | 1.31 | 2.14 | 3.07 | 6.21 | 2.25 | 1.08 | 2.11 | 1.28 | 1.02 | 1.01 | 1.21 | 0.56 | 0.80 | 0.64 | 1.16 |
| 126 | p1E4 | 0.65 | 0.51 | 0.79 | 1.06 | 1.24 | 1.18 | 1.59 | 1.57 | 1.70 | 0.80 | 0.76 | 0.91 | 0.34 | 0.39 | 0.97 | 1.13 |
| 128 | p1D18 | 8.78 | 5.01 | 4.93 | 1.12 | 5.44 | 2.18 | 0.58 | 0.80 | 0.50 | 1.25 | 1.25 | 0.99 | 1.15 | 1.18 | 1.34 | 1.93 |
| 130 | p1D21 | 1.56 | 0.98 | 0.96 | 1.18 | 2.30 | 1.47 | 0.48 | 0.78 | 0.60 | 0.67 | 0.60 | 0.59 | 0.40 | 0.63 | 0.91 | 1.44 |
| 132 | p1C22 | 3.70 | 2.08 | 2.77 | 0.94 | 2.43 | 1.34 | 0.92 | 1.26 | 0.74 | 1.85 | 1.25 | 1.49 | 0.91 | 0.77 | 2.36 | 2.86 |
| 134 | p1C23 | 0.91 | 0.93 | 0.88 | 1.84 | 1.17 | 1.36 | 3.92 | 3.52 | 2.77 | 1.02 | 1.07 | 1.63 | 0.60 | 0.73 | 0.67 | 0.54 |
| 136 | p1D11 | 0.54 | 1.09 | 1.35 | 0.73 | 1.57 | 1.74 | 2.78 | 4.49 | 3.68 | 0.60 | 1.22 | 1.63 | 0.80 | 1.83 | 0.22 | 0.74 |
| 138 | p1E3 | 2.55 | 0.54 | 0.61 | 6.62 | 1.75 | 1.81 | 0.34 | 0.15 | 0.09 | 1.15 | 0.42 | 0.25 | 0.28 | 0.41 | 2.49 | 2.94 |
| 140 | p1D20 | 0.75 | 0.93 | 1.16 | 1.35 | 1.72 | 1.18 | 1.63 | 2.62 | 2.78 | 0.57 | 0.54 | 0.75 | 0.43 | 0.69 | 0.66 | 0.77 |
| 142 | p1E5 | 0.86 | 0.56 | 0.60 | 1.59 | 1.42 | 1.41 | 0.94 | 1.32 | 0.94 | 0.41 | 0.82 | 0.56 | 6.88 | 11.0 | 2.01 | 5.20 |
| 144 | p1D19 | 3.52 | 1.95 | 2.39 | 1.10 | 3.29 | 1.54 | 0.96 | 1.23 | 0.82 | 1.87 | 1.69 | 1.80 | 0.59 | 0.66 | 1.50 | 2.04 |
| 146 | p2A15 | 0.89 | 0.64 | 0.65 | 2.04 | 1.91 | 1.67 | 2.70 | 3.56 | 3.33 | 1.25 | 1.20 | 1.00 | 0.74 | 0.69 | 0.44 | 0.50 |
| 148 | p1I14 | 0.96 | 0.54 | 0.67 | 1.30 | 0.68 | 1.11 | 2.36 | 2.45 | 1.69 | 1.10 | 0.90 | 0.47 | 0.20 | 0.24 | 0.38 | 0.26 |
| 150 | p1I2 | 1.89 | 1.15 | 1.70 | 2.50 | 3.12 | 2.26 | 1.57 | 1.92 | 1.47 | 0.73 | 0.60 | 0.85 | 0.46 | 0.66 | 0.95 | 0.63 |
| 152 | p1I12 | 2.00 | 1.52 | 1.68 | 0.91 | 1.02 | 1.40 | 0.66 | 0.88 | 0.62 | 1.81 | 1.36 | 1.48 | 1.96 | 2.49 | 2.13 | 2.37 |
| 154 | p1I3 | 1.26 | 0.94 | 0.55 | 1.53 | 1.29 | 1.14 | 1.13 | 1.40 | 1.20 | 0.85 | 0.50 | 0.42 | 0.70 | 0.89 | 1.04 | 0.70 |
| 156 | p1I10 | 1.82 | 1.30 | 0.97 | 1.15 | 1.65 | 1.18 | 0.59 | 0.72 | 0.53 | 1.89 | 1.64 | 1.05 | 0.75 | 1.07 | 0.76 | 0.71 |
| 158 | p1H18 | 0.52 | 0.65 | 1.16 | 0.83 | 0.67 | 0.23 | 1.49 | 1.33 | 1.35 | 1.34 | 1.21 | 0.97 | 1.51 | 2.07 | 0.70 | 0.67 |
| 160 | p1H24 | 7.02 | 5.55 | 3.73 | 0.83 | 3.66 | 1.22 | 1.04 | 1.32 | 0.77 | 1.27 | 1.71 | 1.53 | 0.89 | 0.92 | 3.02 | 4.58 |
| 162 | p1E22 | 0.48 | 0.30 | 0.53 | 1.93 | 2.28 | 2.13 | 1.68 | 1.65 | 2.38 | 0.41 | 0.35 | 0.49 | 0.35 | 0.46 | 1.26 | 1.00 |
| 164 | p1H21 | 0.82 | 0.56 | 0.66 | 3.63 | 2.47 | 3.49 | 0.83 | 0.96 | 0.82 | 0.64 | 0.67 | 0.76 | 5.64 | 10.2 | 6.34 | 16.3 |
| 166 | p1I1 | 1.64 | 0.90 | 1.61 | 1.02 | 1.71 | 0.85 | 1.13 | 1.33 | 0.97 | 0.88 | 0.85 | 0.77 | 0.78 | 0.84 | 1.43 | 2.04 |
| 168 | p1H14 | 0.86 | 0.45 | 0.71 | 1.62 | 1.10 | 0.78 | 1.65 | 1.91 | 1.77 | 0.87 | 0.87 | 1.00 | 0.32 | 0.46 | 0.39 | 0.37 |
| 170 | p1H11 | 0.96 | 0.63 | 0.72 | 2.19 | 2.53 | 2.46 | 2.53 | 3.11 | 3.04 | 0.74 | 0.67 | 0.79 | 0.46 | 0.87 | 1.11 | 0.78 |
| 172 | p1H17 | 0.58 | 0.69 | 1.17 | 0.65 | 0.64 | 0.17 | 1.67 | 1.53 | 1.54 | 1.36 | 1.39 | 1.11 | 1.30 | 1.73 | 0.63 | 0.71 |
| 174 | p1H12 | 2.06 | 1.50 | 1.29 | 1.79 | 2.33 | 2.36 | 0.84 | 1.09 | 0.87 | 0.80 | 0.63 | 0.69 | 0.82 | 2.34 | 0.96 | 0.78 |
| 176 | p1H7 | 0.70 | 0.64 | 1.12 | 1.21 | 1.38 | 0.75 | 1.66 | 1.47 | 1.38 | 1.10 | 1.04 | 0.79 | 1.27 | 1.86 | 0.52 | 0.55 |
| 178 | p1H15 | 2.34 | 1.79 | 1.89 | 0.91 | 1.77 | 0.73 | 0.92 | 0.85 | 0.57 | 1.17 | 0.80 | 0.76 | 1.10 | 1.14 | 1.43 | 2.36 |
| 180 | p1H20 | 0.42 | 0.53 | 0.98 | 0.91 | 0.81 | 0.24 | 1.47 | 1.48 | 1.33 | 1.26 | 1.07 | 0.88 | 1.04 | 1.83 | 0.73 | 0.76 |
| 182 | p1H8 | 0.86 | 0.87 | 1.87 | 1.02 | 1.13 | 0.22 | 2.17 | 2.37 | 1.65 | 2.56 | 2.34 | 1.63 | 1.93 | 2.30 | 1.00 | 0.97 |
| 184 | p1H16 | 0.68 | 0.42 | 0.54 | 1.59 | 1.56 | 1.68 | 1.28 | 1.01 | 0.97 | 0.25 | 0.14 | 0.29 | 1.47 | 2.48 | 0.62 | 0.81 |
| 186 | p1H9 | 1.31 | 0.64 | 0.55 | 0.94 | 0.74 | 0.46 | 1.88 | 2.01 | 1.52 | 1.05 | 0.97 | 1.02 | 0.25 | 0.40 | 0.45 | 0.35 |
| 188 | p1H23 | 1.10 | 0.60 | 0.60 | 1.28 | 0.97 | 0.67 | 1.96 | 2.81 | 2.33 | 1.20 | 0.93 | 0.86 | 0.40 | 0.52 | 0.39 | 0.34 |
| 190 | p1H10 | 7.36 | 4.40 | 4.02 | 1.57 | 7.80 | 2.18 | 0.85 | 1.11 | 0.73 | 0.97 | 0.82 | 0.98 | 1.07 | 1.42 | 2.62 | 3.20 |
| 192 | p1H6 | 8.14 | 6.12 | 3.46 | 0.48 | 4.02 | 1.26 | 0.41 | 0.47 | 0.29 | 1.51 | 1.62 | 1.06 | 1.84 | 1.16 | 4.77 | 5.40 |
| 194 | p1H13 | 0.59 | 2.10 | 1.03 | 0.83 | 0.58 | 0.21 | 2.87 | 1.67 | 1.71 | 0.49 | 0.64 | 1.22 | 3.85 | 5.85 | 1.99 | 1.55 |
| 196 | p1H19 | 0.47 | 0.46 | 0.54 | 1.12 | 0.54 | 0.16 | 2.12 | 2.58 | 1.50 | 1.53 | 1.40 | 1.04 | 1.65 | 1.82 | 1.03 | 0.80 |
| 198 | p1G22 | 1.14 | 0.78 | 0.72 | 2.75 | 2.67 | 1.41 | 8.35 | 12.7 | 8.79 | 1.35 | 1.21 | 1.01 | 0.59 | 0.70 | 0.77 | 0.63 |
| 200 | p1G21 | 0.99 | 1.01 | 0.55 | 2.02 | 1.48 | 1.10 | 1.54 | 1.13 | 0.80 | 0.78 | 0.65 | 0.60 | 0.72 | 1.35 | 1.28 | 0.69 |
| 202 | p1H1 | 1.33 | 0.82 | 0.82 | 2.50 | 2.70 | 1.59 | 0.94 | 1.26 | 1.95 | 1.22 | 1.06 | 0.98 | 0.81 | 0.87 | 0.65 | 0.82 |
| 204 | p1G20 | 0.74 | 0.48 | 0.50 | 1.54 | 0.66 | 0.36 | 1.64 | 1.26 | 1.03 | 0.99 | 0.84 | 0.84 | 1.34 | 1.19 | 1.29 | 0.98 |
| 206 | p1H5 | 2.46 | 1.48 | 1.52 | 1.40 | 3.58 | 1.14 | 5.93 | 16.5 | 11.3 | 0.97 | 0.81 | 0.87 | 0.80 | 1.19 | 0.92 | 1.18 |
| 208 | p1G19 | 0.44 | 0.52 | 0.79 | 0.88 | 0.81 | 0.30 | 1.75 | 1.77 | 1.18 | 1.41 | 1.37 | 1.06 | 1.76 | 2.43 | 0.75 | 0.64 |
| 210 | p1H2 | 1.13 | 0.55 | 0.49 | 0.84 | 0.83 | 0.39 | 2.34 | 4.04 | 4.03 | 0.68 | 0.56 | 0.47 | 0.12 | 0.17 | 2.43 | 2.35 |
| 212 | p1G18 | 0.41 | 0.82 | 0.75 | 0.95 | 0.63 | 0.22 | 2.50 | 2.28 | 1.45 | 0.59 | 1.02 | 1.02 | 1.67 | 2.11 | 1.29 | 0.91 |
| 214 | p1H4 | 1.61 | 1.00 | 1.44 | 0.92 | 1.89 | 0.63 | 1.15 | 1.46 | 1.00 | 1.26 | 1.15 | 1.02 | 0.90 | 0.66 | 1.11 | 1.21 |
| 216 | p1H3 | 1.28 | 0.68 | 1.11 | 1.13 | 1.55 | 0.48 | 0.87 | 0.90 | 0.56 | 1.01 | 0.77 | 0.66 | 1.05 | 0.88 | 2.01 | 3.04 |
| 222 | p1P3 | 1.32 | 0.79 | 1.45 | 1.39 | 2.10 | 1.47 | 17.1 | 10.7 | 10.8 | 0.82 | 1.02 | 1.15 | 0.53 | 0.83 | 0.48 | 1.08 |
| 224 | p1A9 | 1.09 | 2.80 | 2.72 | 1.01 | 1.15 | 2.43 | 3.64 | 5.80 | 3.79 | 0.32 | 0.88 | 1.62 | 0.59 | 1.33 | 0.24 | 0.44 |
| 224 | p1A8 | 0.52 | 11.0 | 1.43 | 0.60 | 0.57 | 0.83 | 4.46 | 4.51 | 2.81 | 0.17 | 0.42 | 1.28 | 1.75 | 4.84 | 0.99 | 2.32 |
| 226 | p1B17 | 1.04 | 24.7 | 2.25 | 1.16 | 1.22 | 1.25 | 1.08 | 0.99 | 0.81 | 0.69 | 0.81 | 0.79 | 1.50 | 2.35 | 2.53 | 2.56 |
| 228 | p1O20 | 0.58 | 1.42 | 5.10 | 0.73 | 4.10 | 7.70 | 0.63 | 0.84 | 1.02 | 0.74 | 2.32 | 2.75 | 0.35 | 0.96 | 0.06 | 0.10 |
| 230 | p1B2 | 0.66 | 1.96 | 5.58 | 0.58 | 1.02 | 1.50 | 1.53 | 0.95 | 0.87 | 0.57 | 2.55 | 4.40 | 0.56 | 1.20 | 0.25 | 1.03 |
| 232 | p1B3 | 1.24 | 1.35 | 3.82 | 1.78 | 2.17 | 4.64 | 3.30 | 3.42 | 2.96 | 0.79 | 1.01 | 1.32 | 0.10 | 0.26 | 0.15 | 0.40 |
| 236 | p1B19 | 1.34 | 1.54 | 6.26 | 1.28 | 0.89 | 2.48 | 9.63 | 9.26 | 6.08 | 0.66 | 2.09 | 5.36 | 0.72 | 1.85 | 0.01 | 0.03 |
| 236 | p1B18 | 0.65 | 18.3 | 2.73 | 1.68 | 1.06 | 2.54 | 26.2 | 10.0 | 4.27 | 0.19 | 0.57 | 5.12 | 2.30 | 16.1 | 0.16 | 0.34 |
| 238 | p1N17 | 2.81 | 1.63 | 2.01 | 1.24 | 3.19 | 1.83 | 4.80 | 0.87 | 0.57 | 1.48 | 1.29 | 1.16 | 0.47 | 0.59 | 1.06 | 1.27 |
| 240 | p1A24 | 4.49 | 3.48 | 2.62 | 0.34 | 1.91 | 1.06 | 0.94 | 0.99 | 0.59 | 1.36 | 1.63 | 1.94 | 6.97 | 14.2 | 1.24 | 2.41 |
| 244 | p1B1 | 1.45 | 1.74 | 2.07 | 0.14 | 0.16 | 0.32 | 1.08 | 1.32 | 0.86 | 1.03 | 1.09 | 1.69 | 5.95 | 24.7 | 0.04 | 1.06 |
| 248 | p1A4 | 0.63 | 0.55 | 0.78 | 2.47 | 3.35 | 4.34 | 2.21 | 1.60 | 3.18 | 0.92 | 0.59 | 1.17 | 0.30 | 0.55 | 0.35 | 0.33 |
| 248 | p1A2 | 0.57 | 0.81 | 1.07 | 1.36 | 1.62 | 1.87 | 1.48 | 1.73 | 1.65 | 0.44 | 0.48 | 1.02 | 0.33 | 0.65 | 0.51 | 1.49 |
| 248 | p1A3 | 0.55 | 1.18 | 0.80 | 0.56 | 1.04 | 1.29 | 1.42 | 1.47 | 1.06 | 0.56 | 0.92 | 1.40 | 0.20 | 0.36 | 0.37 | 1.88 |
| 248 | p1A1 | 0.58 | 1.50 | 0.66 | 1.06 | 1.04 | 1.19 | 1.35 | 1.20 | 1.07 | 0.77 | 1.65 | 0.82 | 0.59 | 1.31 | 0.53 | 1.76 |
| 250 | p1A16 | 0.75 | 1.16 | 0.95 | 1.36 | 1.29 | 1.26 | 1.22 | 1.65 | 1.37 | 0.66 | 0.89 | 0.74 | 0.63 | 1.20 | 0.44 | 0.92 |
| 250 | p1A15 | 0.49 | 1.03 | 1.93 | 0.27 | 1.07 | 1.07 | 0.67 | 1.54 | 1.03 | 0.39 | 1.66 | 1.22 | 0.04 | 0.10 | 0.79 | 3.65 |
| 250 | p1A18 | 0.60 | 0.86 | 1.64 | 0.28 | 1.02 | 0.96 | 0.70 | 1.44 | 1.22 | 0.46 | 1.52 | 1.35 | 0.23 | 0.26 | 0.96 | 4.48 |
| 250 | p1A17 | 0.78 | 2.06 | 0.51 | 1.32 | 1.13 | 0.93 | 0.79 | 1.03 | 1.54 | 0.64 | 1.17 | 0.74 | 0.47 | 0.67 | 1.01 | 6.98 |
| 252 | p1B14 | 0.78 | 1.20 | 5.92 | 6.75 | 3.77 | 5.37 | 1.13 | 5.81 | 6.57 | 0.17 | 0.33 | 0.66 | 2.16 | 4.85 | 0.10 | 0.12 |
| 252 | p1B15 | 1.22 | 1.15 | 7.37 | 14.4 | 11.6 | 11.0 | 0.92 | 6.90 | 6.45 | 0.40 | 0.61 | 0.94 | 1.89 | 3.76 | 0.08 | 0.10 |
| 252 | p1B16 | 1.14 | 0.97 | 7.33 | 13.6 | 10.7 | 9.97 | 1.04 | 7.34 | 7.64 | 0.45 | 0.65 | 1.03 | 1.99 | 3.48 | 0.09 | 0.10 |
| 254 | p1A12 | 0.44 | 0.91 | 1.17 | 1.07 | 0.92 | 1.33 | 4.01 | 3.77 | 3.56 | 0.77 | 1.59 | 2.04 | 0.37 | 0.55 | 0.44 | 0.70 |
| 254 | p1A11 | 0.16 | 3.67 | 0.42 | 0.58 | 0.42 | 0.57 | 2.87 | 1.45 | 0.95 | 0.20 | 0.43 | 2.01 | 1.85 | 5.50 | 1.17 | 5.82 |
| 256 | p1A13 | 0.34 | 2.14 | 1.10 | 0.42 | 0.36 | 0.65 | 3.57 | 3.81 | 3.15 | 0.19 | 0.79 | 1.98 | 0.34 | 0.60 | 1.24 | 1.86 |
| 258 | p1A14 | 0.27 | 5.92 | 0.30 | 0.40 | 0.45 | 0.71 | 7.23 | 2.92 | 2.30 | 0.08 | 0.18 | 1.06 | 2.39 | 6.30 | 4.94 | 7.07 |
| 260 | p1A19 | 0.56 | 2.88 | 0.45 | 0.99 | 0.90 | 1.33 | 2.11 | 1.14 | 0.73 | 0.45 | 0.53 | 0.82 | 1.46 | 4.56 | 4.90 | 1.37 |
| 262 | p1A20 | 0.20 | 8.18 | 0.34 | 0.36 | 0.40 | 0.68 | 14.1 | 8.24 | 6.34 | 0.06 | 0.27 | 1.66 | 1.38 | 3.74 | 2.34 | 3.16 |
| 264 | p1A22 | 0.78 | 1.44 | 2.34 | 0.52 | 1.40 | 1.52 | 2.59 | 0.81 | 2.38 | 0.46 | 1.47 | 1.92 | 0.77 | 0.98 | 0.19 | 0.56 |
| 266 | p1A23 | 0.71 | 2.10 | 1.41 | 0.07 | 0.06 | 0.13 | 3.12 | 2.80 | 1.63 | 1.06 | 1.94 | 2.95 | 7.39 | 18.1 | 0.03 | 0.95 |
| 268 | p1B21 | 3.08 | 1.82 | 2.69 | 0.59 | 3.22 | 0.71 | 0.56 | 0.66 | 0.41 | 1.48 | 1.45 | 0.75 | 0.77 | 0.99 | 96.6 | 117 |
| 268 | p1B20 | 0.72 | 0.85 | 0.77 | 1.17 | 1.27 | 1.05 | 0.74 | 1.03 | 0.57 | 0.80 | 0.77 | 0.64 | 0.61 | 1.25 | 1505 | 1742 |
| 270 | p1C17 | 0.38 | 0.91 | 0.47 | 1.39 | 0.63 | 1.21 | 3.27 | 2.63 | 2.74 | 0.37 | 0.28 | 0.59 | 0.21 | 0.18 | 3.94 | 4.47 |
| 270 | p1C18 | 0.42 | 0.76 | 0.51 | 1.51 | 0.99 | 1.69 | 2.88 | 2.45 | 2.64 | 0.32 | 0.31 | 0.54 | 0.16 | 0.27 | 4.76 | 5.23 |
| 272 | p1D8 | 2.74 | 2.48 | 2.75 | 0.99 | 2.72 | 1.61 | 0.74 | 0.78 | 0.74 | 1.31 | 1.08 | 1.01 | 0.84 | 0.91 | 2.08 | 2.03 |
| 274 | p1A10 | 0.13 | 1.74 | 1.78 | 0.33 | 2.02 | 1.93 | 3.00 | 3.12 | 2.80 | 0.20 | 1.69 | 2.86 | 0.06 | 0.27 | 0.30 | 1.81 |
| 276 | p1G24 | 1.41 | 1.31 | 1.91 | 3.09 | 4.24 | 2.63 | 0.92 | 1.60 | 0.93 | 1.14 | 1.39 | 1.75 | 0.14 | 0.30 | 0.40 | 0.70 |
| 278 | p1G23 | 2.81 | 1.41 | 1.97 | 1.06 | 2.80 | 1.23 | 0.90 | 1.14 | 0.62 | 0.94 | 0.85 | 0.80 | 0.37 | 0.51 | 2.52 | 1.37 |
| 280 | p1G5 | 0.34 | 0.86 | 1.46 | 0.56 | 1.70 | 1.61 | 0.63 | 1.16 | 1.35 | 0.43 | 1.23 | 1.77 | 0.21 | 0.53 | 0.21 | 0.97 |
| 282 | p1G7 | 0.74 | 0.61 | 0.80 | 1.25 | 1.26 | 1.03 | 1.13 | 1.77 | 1.39 | 0.87 | 1.28 | 1.54 | 0.37 | 0.56 | 0.36 | 0.61 |
| 284 | p2A23 | 1.79 | 1.24 | 1.15 | 1.81 | 2.26 | 1.79 | 1.11 | 1.28 | 0.95 | 1.26 | 0.87 | 0.77 | 0.77 | 1.43 | 0.76 | 0.91 |
| 286 | p1G1 | 0.54 | 0.39 | 0.81 | 1.68 | 2.29 | 0.15 | 1.05 | 1.41 | 1.33 | 1.85 | 2.65 | 1.71 | 0.35 | 0.58 | 0.21 | 0.33 |
| 288 | p1G15 | 7.04 | 5.26 | 3.09 | 0.70 | 3.29 | 2.10 | 0.57 | 0.77 | 0.55 | 2.10 | 1.82 | 1.03 | 1.54 | 1.44 | 3.27 | 3.54 |
| 290 | p1F23 | 0.90 | 0.42 | 1.09 | 1.89 | 1.13 | 1.09 | 1.22 | 2.57 | 1.79 | 1.10 | 0.88 | 0.70 | 0.42 | 0.55 | 0.33 | 0.40 |
| 292 | p1G8 | 1.02 | 0.70 | 1.33 | 0.86 | 3.03 | 1.31 | 1.15 | 3.36 | 2.20 | 1.04 | 1.93 | 1.56 | 0.33 | 0.71 | 0.23 | 0.35 |
| 294 | p1G13 | 8.69 | 6.51 | 4.23 | 1.06 | 4.37 | 2.12 | 0.37 | 0.47 | 0.36 | 1.39 | 1.41 | 0.82 | 1.03 | 1.17 | 5.78 | 7.17 |
| 296 | p1G10 | 1.01 | 0.61 | 1.52 | 1.69 | 1.76 | 1.65 | 2.01 | 3.58 | 2.49 | 1.32 | 1.13 | 0.99 | 0.44 | 0.65 | 0.44 | 0.62 |
| 298 | p1F24 | 1.17 | 0.70 | 1.01 | 9.63 | 5.52 | 8.15 | 0.56 | 0.87 | 0.56 | 12.8 | 11.5 | 14.2 | 0.12 | 0.15 | 0.11 | 0.14 |
| 300 | p1G2 | 1.69 | 1.00 | 1.36 | 5.01 | 4.65 | 3.35 | 1.04 | 1.47 | 0.83 | 1.28 | 1.39 | 1.24 | 0.36 | 1.37 | 0.42 | 0.48 |
| 302 | p1G11 | 0.53 | 0.42 | 0.42 | 0.55 | 0.86 | 0.65 | 1.43 | 3.83 | 3.56 | 0.45 | 0.36 | 0.43 | 1.21 | 1.55 | 0.29 | 0.53 |
| 304 | p1G16 | 0.53 | 0.29 | 0.55 | 1.58 | 1.64 | 1.65 | 1.10 | 2.51 | 1.64 | 0.87 | 0.64 | 0.71 | 0.41 | 0.74 | 0.23 | 0.34 |
| 306 | p1G9 | 1.32 | 0.61 | 0.77 | 1.07 | 1.78 | 0.79 | 0.74 | 1.22 | 0.96 | 0.95 | 0.85 | 0.66 | 0.79 | 1.09 | 0.94 | 1.06 |
| 308 | p1G4 | 0.83 | 0.42 | 0.92 | 1.67 | 3.65 | 9.50 | 0.69 | 0.62 | 0.54 | 1.48 | 0.87 | 1.17 | 0.49 | 0.74 | 0.71 | 1.39 |
| 310 | p1G14 | 8.40 | 5.55 | 4.36 | 0.70 | 4.34 | 1.75 | 0.47 | 0.56 | 0.36 | 1.14 | 0.98 | 0.90 | 1.30 | 1.11 | 3.49 | 4.03 |
| 312 | p1A6 | 0.30 | 0.59 | 2.57 | 0.31 | 1.10 | 1.88 | 1.02 | 1.31 | 1.44 | 0.56 | 1.50 | 2.81 | 0.16 | 0.24 | 0.23 | 0.80 |
| 312 | p1A5 | 5.61 | 2.87 | 4.93 | 1.15 | 4.00 | 2.95 | 0.60 | 0.87 | 0.47 | 1.77 | 1.64 | 1.79 | 0.56 | 0.55 | 1.70 | 3.28 |
| 314 | p1B9 | 1.14 | 19.9 | 3.20 | 0.86 | 2.05 | 1.01 | 1.01 | 1.35 | 1.08 | 0.63 | 3.53 | 6.52 | 0.75 | 2.19 | 1.66 | 2.87 |
| 314 | p1B6 | 0.69 | 18.7 | 1.14 | 0.59 | 0.72 | 0.92 | 0.70 | 0.54 | 0.61 | 0.59 | 0.89 | 1.01 | 1.54 | 4.45 | 2.13 | 3.09 |
| 314 | p1B8 | 1.11 | 35.1 | 0.81 | 0.74 | 1.23 | 1.02 | 1.15 | 1.35 | 0.91 | 0.57 | 1.27 | 3.41 | 0.85 | 3.57 | 2.53 | 3.71 |
| 314 | p1B7 | 0.60 | 34.9 | 1.17 | 0.59 | 0.74 | 0.80 | 0.90 | 0.80 | 0.72 | 0.48 | 0.84 | 1.76 | 1.94 | 4.62 | 4.60 | 7.31 |
| 316 | p1G17 | 0.85 | 1.53 | 0.92 | 1.10 | 0.83 | 1.05 | 2.04 | 1.86 | 1.78 | 1.40 | 2.19 | 2.22 | 0.81 | 0.87 | 0.46 | 0.74 |
| 318 | p1G3 | 0.38 | 0.39 | 1.02 | 0.76 | 1.16 | 0.87 | 1.38 | 1.89 | 1.71 | 0.81 | 0.73 | 1.00 | 0.81 | 2.03 | 0.24 | 0.48 |
| 320 | p1F22 | 0.94 | 0.56 | 0.75 | 1.15 | 1.24 | 1.60 | 2.56 | 3.11 | 2.46 | 1.10 | 1.70 | 1.67 | 0.45 | 0.47 | 0.29 | 0.31 |
| 322 | p1G12 | 0.29 | 0.41 | 0.96 | 0.99 | 1.95 | 1.56 | 0.80 | 1.75 | 1.22 | 0.54 | 0.87 | 1.24 | 0.12 | 0.31 | 0.16 | 0.30 |
| 324 | p1F11 | 1.49 | 0.94 | 1.01 | 1.16 | 1.64 | 1.56 | 0.64 | 0.91 | 0.71 | 0.84 | 0.69 | 1.00 | 0.77 | 1.16 | 0.53 | 1.01 |
| 326 | p1F16 | 2.63 | 0.62 | 0.65 | 6.26 | 1.77 | 1.43 | 0.39 | 0.16 | 0.13 | 1.07 | 0.39 | 0.30 | 0.29 | 0.30 | 2.73 | 3.22 |
| 328 | p1F14 | 0.75 | 0.39 | 0.89 | 0.97 | 0.92 | 0.84 | 1.29 | 1.35 | 1.36 | 0.93 | 0.90 | 1.03 | 0.54 | 0.98 | 0.16 | 0.22 |
| 330 | p1F17 | 1.52 | 0.95 | 1.82 | 5.53 | 3.68 | 5.49 | 0.24 | 0.32 | 0.33 | 2.14 | 2.44 | 2.18 | 0.86 | 1.66 | 0.22 | 0.92 |
| 332 | p1C2 | 0.26 | 0.31 | 0.31 | 1.00 | 1.28 | 1.53 | 5.09 | 13.6 | 16.1 | 0.17 | 0.21 | 0.31 | 0.19 | 0.37 | 0.67 | 1.53 |
| 334 | p1F3 | 1.64 | 1.06 | 1.20 | 1.52 | 1.52 | 1.41 | 1.05 | 1.55 | 1.28 | 1.26 | 1.02 | 0.99 | 0.71 | 1.05 | 0.46 | 0.50 |
| 336 | p1F20 | 0.69 | 1.35 | 1.32 | 1.10 | 1.16 | 1.03 | 1.73 | 2.66 | 2.42 | 0.34 | 0.64 | 0.76 | 0.86 | 1.82 | 0.53 | 0.87 |
| 338 | p1F6 | 1.92 | 1.67 | 2.74 | 0.11 | 0.17 | 0.28 | 1.73 | 1.30 | 1.02 | 1.80 | 2.33 | 2.74 | 5.33 | 7.33 | 0.04 | 0.73 |
| 340 | p1F4 | 1.50 | 1.06 | 0.87 | 1.14 | 1.59 | 1.15 | 0.68 | 1.05 | 0.83 | 0.92 | 0.72 | 0.66 | 0.94 | 1.85 | 2.78 | 6.20 |
| 342 | p1F15 | 1.29 | 0.82 | 1.10 | 1.97 | 1.87 | 1.33 | 1.71 | 1.75 | 1.30 | 0.62 | 0.78 | 0.74 | 0.34 | 0.81 | 0.63 | 0.83 |
| 344 | p1F13 | 0.32 | 1.18 | 2.65 | 0.54 | 3.15 | 2.25 | 0.74 | 1.19 | 1.19 | 0.80 | 3.41 | 4.43 | 0.21 | 0.49 | 0.17 | 0.52 |
| 346 | p1A7 | 0.74 | 0.60 | 0.50 | 0.87 | 0.63 | 0.80 | 0.85 | 0.95 | 0.69 | 0.71 | 0.57 | 0.76 | 0.73 | 1.22 | 1.59 | 1.11 |
| 348 | p1A21 | 1.35 | 0.89 | 1.29 | 1.27 | 1.17 | 0.98 | 0.85 | 1.49 | 1.32 | 1.07 | 1.31 | 1.17 | 0.52 | 0.49 | 0.18 | 0.22 |
| 350 | p1B5 | 1.08 | 0.94 | 3.22 | 1.73 | 1.39 | 3.45 | 2.08 | 2.24 | 1.78 | 0.34 | 0.55 | 1.57 | 0.10 | 0.17 | 0.07 | 0.13 |
| 350 | p1B4 | 0.71 | 7.10 | 2.98 | 2.43 | 1.47 | 3.12 | 10.3 | 7.97 | 5.70 | 0.48 | 0.93 | 2.72 | 0.65 | 1.12 | 0.44 | 0.75 |
| 352 | p1B12 | 1.74 | 1.15 | 1.23 | 0.70 | 1.53 | 0.93 | 0.60 | 0.57 | 0.30 | 0.94 | 0.88 | 0.89 | 0.34 | 0.37 | 1.15 | 1.50 |
| 352 | p1B11 | 0.21 | 0.17 | 0.40 | 1.25 | 1.64 | 1.18 | 1.14 | 0.66 | 0.45 | 0.94 | 1.02 | 1.31 | 0.28 | 0.30 | 0.27 | 0.64 |
| 352 | p1B10 | 0.46 | 0.97 | 0.71 | 1.31 | 0.94 | 1.06 | 1.92 | 2.27 | 1.82 | 0.51 | 0.43 | 0.63 | 0.86 | 2.71 | 0.44 | 0.99 |
| 354 | p1B13 | 0.93 | 0.99 | 1.06 | 0.85 | 1.01 | 0.91 | 0.77 | 0.97 | 0.68 | 1.00 | 1.03 | 1.02 | 1.22 | 1.61 | 1.20 | 1.42 |
| 356 | p1B22 | 3.21 | 1.60 | 3.89 | 1.04 | 0.81 | 0.97 | 3.14 | 4.98 | 4.06 | 1.67 | 1.55 | 1.15 | 0.20 | 0.21 | 0.30 | 0.34 |
| 358 | p1B23 | 0.36 | 0.52 | 1.08 | 0.80 | 1.09 | 1.17 | 0.93 | 0.66 | 0.85 | 0.27 | 0.52 | 0.82 | 1.05 | 1.83 | 17.2 | 12.5 |
| 360 | p1B24 | 0.54 | 0.24 | 0.51 | 0.67 | 0.52 | 1.09 | 1.88 | 2.32 | 1.98 | 0.65 | 0.54 | 0.70 | 0.34 | 0.34 | 0.86 | 1.59 |
| 362 | p1C3 | 0.71 | 0.68 | 0.77 | 2.10 | 0.92 | 1.22 | 4.25 | 2.15 | 1.97 | 1.07 | 1.18 | 1.09 | 0.46 | 0.54 | 0.48 | 0.57 |
| 364 | p1C4 | 0.80 | 0.81 | 0.75 | 1.82 | 1.94 | 1.74 | 1.18 | 1.08 | 1.02 | 0.88 | 0.77 | 0.78 | 0.73 | 1.04 | 0.79 | 1.02 |
| 366 | p1C5 | 0.52 | 0.67 | 1.21 | 0.93 | 0.89 | 1.07 | 1.80 | 2.92 | 2.03 | 0.70 | 1.42 | 1.68 | 0.58 | 1.01 | 0.61 | 0.85 |
| 368 | p1C6 | 0.41 | 3.01 | 0.46 | 0.86 | 0.85 | 0.76 | 1.67 | 1.69 | 1.30 | 0.51 | 0.72 | 0.81 | 0.97 | 2.40 | 1.15 | 4.75 |
| 370 | p1C7 | 0.93 | 2.60 | 0.63 | 0.74 | 0.89 | 0.75 | 3.35 | 1.93 | 1.49 | 0.61 | 0.93 | 0.83 | 1.81 | 2.86 | 1.92 | 1.25 |
| 372 | p1C8 | 0.11 | 0.51 | 0.83 | 1.17 | 1.79 | 2.54 | 1.93 | 2.11 | 1.46 | 0.07 | 0.82 | 0.84 | 0.61 | 1.54 | 0.89 | 0.77 |
| 374 | p1C9 | 1.04 | 1.00 | 1.67 | 1.31 | 1.62 | 1.61 | 1.18 | 2.32 | 1.60 | 0.75 | 0.86 | 0.89 | 0.42 | 0.57 | 0.57 | 0.60 |
| 376 | p1C10 | 0.65 | 0.58 | 0.43 | 1.29 | 1.10 | 1.42 | 0.93 | 1.48 | 1.17 | 1.07 | 0.93 | 0.84 | 0.68 | 0.84 | 14.6 | 15.2 |
| 378 | p1C11 | 0.69 | 1.30 | 0.86 | 1.59 | 0.56 | 0.90 | 2.64 | 2.63 | 2.42 | 0.45 | 0.52 | 1.32 | 0.79 | 1.37 | 0.90 | 0.59 |
| 380 | p1C12 | 1.00 | 1.39 | 0.78 | 1.31 | 1.07 | 1.31 | 2.18 | 1.86 | 1.29 | 0.75 | 0.91 | 1.05 | 0.97 | 2.57 | 0.55 | 0.88 |
| 382 | p1C13 | 0.61 | 5.60 | 1.61 | 0.78 | 0.80 | 0.90 | 3.98 | 3.29 | 2.33 | 0.73 | 2.76 | 6.00 | 0.54 | 1.10 | 1.24 | 1.66 |
| 384 | p1C14 | 0.44 | 3.47 | 0.52 | 0.64 | 0.96 | 0.89 | 4.73 | 3.06 | 1.92 | 0.59 | 0.69 | 1.91 | 1.10 | 2.27 | 1.64 | 2.85 |
| 386 | p1C15 | 1.40 | 0.82 | 0.84 | 0.50 | 0.65 | 0.50 | 2.02 | 6.84 | 2.20 | 2.00 | 1.39 | 1.64 | 0.37 | 0.42 | 0.46 | 0.58 |
| 388 | p1C16 | 2.84 | 1.76 | 2.30 | 0.95 | 1.80 | 1.11 | 0.95 | 5.76 | 6.09 | 1.57 | 1.27 | 0.98 | 0.66 | 0.68 | 1.25 | 1.79 |
| 390 | p1C19 | 2.33 | 1.63 | 1.78 | 0.58 | 0.90 | 0.67 | 0.73 | 1.35 | 1.04 | 0.98 | 0.97 | 0.98 | 0.33 | 0.33 | 13.7 | 17.4 |
| 392 | p1C20 | 0.68 | 1.08 | 1.96 | 1.56 | 1.12 | 1.04 | 2.89 | 4.45 | 4.18 | 0.71 | 1.25 | 1.76 | 0.31 | 0.47 | 0.27 | 0.48 |
| 396 | p1P5 | 3.26 | 1.18 | 1.71 | 70.5 | 33.8 | 21.0 | 1.93 | 6.73 | 7.47 | 1.84 | 2.20 | 1.55 | 0.75 | 0.67 | 1.12 | 0.57 |
| 398 | p2L23 | 0.99 | 0.66 | 0.57 | 63.1 | 35.3 | 56.2 | 245 | 289 | 339 | 0.47 | 0.50 | 0.42 | 0.47 | 1.04 | 0.30 | 0.32 |
| 402 | p1K9 | 1.09 | 0.61 | 1.08 | 1.23 | 0.55 | 1.15 | 1.42 | 2.46 | 2.34 | 2.23 | 1.48 | 1.83 | 0.01 | 0.01 | 0.18 | 0.24 |
| 404 | p1K23 | 1.91 | 1.08 | 1.43 | 0.91 | 0.60 | 0.75 | 1.67 | 1.98 | 1.51 | 2.01 | 1.52 | 1.89 | 0.72 | 0.72 | 0.18 | 0.18 |
| 406 | p1K15 | 2.31 | 1.24 | 1.63 | 1.23 | 2.38 | 1.19 | 0.89 | 1.09 | 0.82 | 1.11 | 0.96 | 0.84 | 2.57 | 2.98 | 13.2 | 14.6 |
| 408 | p1K8 | 1.32 | 0.86 | 0.76 | 0.97 | 1.35 | 1.29 | 1.08 | 1.98 | 1.56 | 0.98 | 0.71 | 0.72 | 0.94 | 1.46 | 3.51 | 1.11 |
| 410 | p1M24 | 1.71 | 0.94 | 1.37 | 1.68 | 2.31 | 1.49 | 1.24 | 1.49 | 1.29 | 0.81 | 0.74 | 1.10 | 0.42 | 0.75 | 1.22 | 0.69 |
| 412 | p1K7 | 2.24 | 0.79 | 0.56 | 1.84 | 0.69 | 0.58 | 2.40 | 4.45 | 2.78 | 2.16 | 1.57 | 1.05 | 0.62 | 0.51 | 0.46 | 0.21 |
| 414 | p1K16 | 1.23 | 0.58 | 0.37 | 1.14 | 0.64 | 0.49 | 2.19 | 2.31 | 1.76 | 1.05 | 0.69 | 0.64 | 0.48 | 0.50 | 0.41 | 0.19 |
| 416 | p1K18 | 3.59 | 1.63 | 1.92 | 1.02 | 2.11 | 1.23 | 1.07 | 1.33 | 0.92 | 2.28 | 1.71 | 1.51 | 0.89 | 0.76 | 1.94 | 1.43 |
| 418 | p1N1 | 0.83 | 0.42 | 0.54 | 1.45 | 0.67 | 0.85 | 1.38 | 1.52 | 1.32 | 1.28 | 0.96 | 1.03 | 0.24 | 0.36 | 0.24 | 0.13 |
| 420 | p1K22 | 1.82 | 1.13 | 0.74 | 0.90 | 0.73 | 0.51 | 2.20 | 2.31 | 1.76 | 1.27 | 0.91 | 1.03 | 0.55 | 0.61 | 0.37 | 0.26 |
| 422 | p1K14 | 0.87 | 0.94 | 1.02 | 1.06 | 0.96 | 0.95 | 1.39 | 1.74 | 1.21 | 0.96 | 1.02 | 1.08 | 1.14 | 1.56 | 1.10 | 1.30 |
| 424 | p1K13 | 1.70 | 0.82 | 1.59 | 1.14 | 0.76 | 1.10 | 6.27 | 4.09 | 4.13 | 3.03 | 2.53 | 2.33 | 0.43 | 0.46 | 1.33 | 0.75 |
| 426 | p1J20 | 1.07 | 0.84 | 1.33 | 0.87 | 1.05 | 0.29 | 1.50 | 1.73 | 1.35 | 1.30 | 1.44 | 0.95 | 1.27 | 1.84 | 0.87 | 0.58 |
| 428 | p1J22 | 2.11 | 2.14 | 1.90 | 1.00 | 1.69 | 1.41 | 0.74 | 0.86 | 0.59 | 1.95 | 1.68 | 1.34 | 2.55 | 2.75 | 2.32 | 2.40 |
| 430 | p1K1 | 1.09 | 1.27 | 0.65 | 1.74 | 0.79 | 0.67 | 1.18 | 1.46 | 1.08 | 0.47 | 0.46 | 0.56 | 1.06 | 1.93 | 1.11 | 0.70 |
| 432 | p1K3 | 1.18 | 1.11 | 0.83 | 1.19 | 1.95 | 1.20 | 0.61 | 0.78 | 0.47 | 0.97 | 0.83 | 0.75 | 1.00 | 1.54 | 55.5 | 32.9 |
| 434 | p1J19 | 1.62 | 1.24 | 0.85 | 1.63 | 2.03 | 2.49 | 0.50 | 0.73 | 0.54 | 0.76 | 0.58 | 0.68 | 0.99 | 1.77 | 7.90 | 4.54 |
| 434 | p1K2 | 1.06 | 0.80 | 0.92 | 1.67 | 1.95 | 1.52 | 0.41 | 0.82 | 0.39 | 0.94 | 0.87 | 0.83 | 0.78 | 0.83 | 10.1 | 5.86 |
| 436 | p1K5 | 0.93 | 0.43 | 0.81 | 0.93 | 0.54 | 0.54 | 1.58 | 1.27 | 1.28 | 1.24 | 0.89 | 1.19 | 0.23 | 0.31 | 0.17 | 0.18 |
| 438 | p1J17 | 0.93 | 0.72 | 0.95 | 1.11 | 1.25 | 0.49 | 0.93 | 0.65 | 0.39 | 1.09 | 0.58 | 0.45 | 0.95 | 1.11 | 2.10 | 2.41 |
| 440 | p1J18 | 0.31 | 0.18 | 0.36 | 1.10 | 0.53 | 0.26 | 1.04 | 0.44 | 0.24 | 0.94 | 0.43 | 0.44 | 1.35 | 1.30 | 2.83 | 4.02 |
| 442 | p1J15 | 0.55 | 0.66 | 1.26 | 0.99 | 0.68 | 0.22 | 1.68 | 1.41 | 1.25 | 1.75 | 1.55 | 1.24 | 1.47 | 2.14 | 0.69 | 0.65 |
| 444 | p1K4 | 0.41 | 0.21 | 0.23 | 1.61 | 1.07 | 1.06 | 1.38 | 1.29 | 0.96 | 0.90 | 0.65 | 0.68 | 0.67 | 1.07 | 0.66 | 0.35 |
| 446 | p2A14 | 2.61 | 2.13 | 1.22 | 0.87 | 1.15 | 1.12 | 0.95 | 1.36 | 0.83 | 2.04 | 1.59 | 1.21 | 1.97 | 2.23 | 1.18 | 1.21 |
| 448 | p1J23 | 0.96 | 0.57 | 0.50 | 1.05 | 1.18 | 1.38 | 0.73 | 1.01 | 0.70 | 0.54 | 0.42 | 0.54 | 0.94 | 1.33 | 10.5 | 5.19 |
| 450 | p1J21 | 0.75 | 0.68 | 0.96 | 1.16 | 1.09 | 0.52 | 1.61 | 1.35 | 1.35 | 1.15 | 0.96 | 0.79 | 0.98 | 1.60 | 0.56 | 0.66 |
| 452 | p1J24 | 1.62 | 0.56 | 0.84 | 1.98 | 1.51 | 0.96 | 1.56 | 2.04 | 1.37 | 1.05 | 0.81 | 0.52 | 0.56 | 0.62 | 0.30 | 0.27 |
| 454 | p1J16 | 3.62 | 1.55 | 2.31 | 1.38 | 2.76 | 1.29 | 2.85 | 4.20 | 3.66 | 1.65 | 1.84 | 1.78 | 0.53 | 0.76 | 1.04 | 0.62 |
| 456 | p1J2 | 0.77 | 0.76 | 0.37 | 1.57 | 0.75 | 0.51 | 2.52 | 3.12 | 2.29 | 0.38 | 0.28 | 0.45 | 0.72 | 1.14 | 0.63 | 0.30 |
| 458 | p1J9 | 0.73 | 0.45 | 0.38 | 1.22 | 1.38 | 1.06 | 2.10 | 1.00 | 0.87 | 0.38 | 0.34 | 0.34 | 0.71 | 1.18 | 3.04 | 3.92 |
| 460 | p1J10 | 0.86 | 0.48 | 0.72 | 1.18 | 1.10 | 0.85 | 1.70 | 2.20 | 1.82 | 1.20 | 0.92 | 1.08 | 0.26 | 0.32 | 0.62 | 0.48 |
| 462 | p1J1 | 0.97 | 0.70 | 0.68 | 1.41 | 1.09 | 0.87 | 3.29 | 3.09 | 2.75 | 0.63 | 0.45 | 0.51 | 0.63 | 0.86 | 0.55 | 0.46 |
| 464 | p1J5 | 2.26 | 0.94 | 0.74 | 56.2 | 22.5 | 16.6 | 1.12 | 2.88 | 2.58 | 1.22 | 0.79 | 0.83 | 1.06 | 1.15 | 3.02 | 1.07 |
| 466 | p1J11 | 0.95 | 0.57 | 0.30 | 0.71 | 0.51 | 0.60 | 0.95 | 0.70 | 0.70 | 0.37 | 0.22 | 0.18 | 0.86 | 1.20 | 1.77 | 0.97 |
| 468 | p1J8 | 1.77 | 0.67 | 1.20 | 1.73 | 0.98 | 0.66 | 1.16 | 1.88 | 1.28 | 1.70 | 1.59 | 1.57 | 0.28 | 0.34 | 0.11 | 0.08 |
| 470 | p1I20 | 2.84 | 1.42 | 1.67 | 1.17 | 2.14 | 1.41 | 0.99 | 1.46 | 1.03 | 0.79 | 0.72 | 0.92 | 0.74 | 0.90 | 7.59 | 2.80 |
| 472 | p1J3 | 0.70 | 0.39 | 0.64 | 1.75 | 1.28 | 1.04 | 1.24 | 1.61 | 1.81 | 0.94 | 0.69 | 0.85 | 0.33 | 0.52 | 0.53 | 0.51 |
| 474 | p1J12 | 7.58 | 4.86 | 4.02 | 0.90 | 4.17 | 1.83 | 0.84 | 1.06 | 0.78 | 1.06 | 0.88 | 0.90 | 1.01 | 0.94 | 3.33 | 4.41 |
| 476 | p1I23 | 1.35 | 0.87 | 0.71 | 1.36 | 2.00 | 1.43 | 0.71 | 1.03 | 0.70 | 0.80 | 1.12 | 1.23 | 0.41 | 0.84 | 2.67 | 1.69 |
| 478 | p1J7 | 1.54 | 0.65 | 0.90 | 1.22 | 1.15 | 0.65 | 1.34 | 1.20 | 1.06 | 1.50 | 1.07 | 0.97 | 0.26 | 0.31 | 0.40 | 0.28 |
| 480 | p1I21 | 1.76 | 0.96 | 0.81 | 31.8 | 11.1 | 9.16 | 1.33 | 2.83 | 2.80 | 1.14 | 0.85 | 0.92 | 1.16 | 1.74 | 1.19 | 0.42 |
| 482 | p1I19 | 1.15 | 0.74 | 0.71 | 11.42 | 5.80 | 5.51 | 0.83 | 2.40 | 2.91 | 0.82 | 0.66 | 0.94 | 6.67 | 8.50 | 0.41 | 0.34 |
| 484 | p1J4 | 1.92 | 0.80 | 0.63 | 2.15 | 0.85 | 0.63 | 3.22 | 7.24 | 4.65 | 2.55 | 1.77 | 1.05 | 0.91 | 1.08 | 0.13 | 0.07 |
| 486 | p1I24 | 3.43 | 1.85 | 1.70 | 20.5 | 11.56 | 9.6 | 0.51 | 1.70 | 1.90 | 1.00 | 0.84 | 0.98 | 2.75 | 3.80 | 0.67 | 0.77 |
| 488 | p1I18 | 1.27 | 0.84 | 0.91 | 6.72 | 5.15 | 4.95 | 1.01 | 1.60 | 1.28 | 0.81 | 0.81 | 0.67 | 0.80 | 1.49 | 0.85 | 0.58 |

| | | #6 | | #7 | #7 | | #8 | #8 | | #9 | #9 | | #10 | #10 | | #11 | #11 |
|---|---|---|---|---|---|---|---|---|---|---|---|---|---|---|---|---|---|
| Seq | | HY | #7 | HY | HY | #8 | HY | HY | #9 | HY | HY | #10 | HY | HY | #11 | HY | HY |
| ID | Clone | 18 hr | NO | 6 hr | 18 hr | NO | 6 hr | 18 hr | NO | 6 hr | 18 hr | NO | 6 hr | 18 hr | NO | 6 hr | 18 hr |
| 2 | p1F12 | 0.71 | 0.41 | 0.45 | 0.26 | 0.42 | 0.70 | 0.65 | 1.55 | 1.34 | 1.68 | 0.80 | 1.06 | 0.95 | 1.21 | 1.68 | 1.38 |
| 4 | p1F2 | 1.29 | 0.83 | 1.55 | 0.94 | 1.42 | 1.92 | 4.03 | 0.73 | 0.57 | 0.87 | 0.31 | 0.33 | 0.42 | 0.69 | 1.03 | 0.79 |
| 6 | p1F10 | 1.50 | 0.98 | 2.39 | 0.54 | 0.59 | 0.77 | 0.87 | 1.01 | 0.88 | 0.72 | 0.77 | 0.91 | 0.76 | 1.85 | 1.90 | 1.62 |
| 8 | p1F19 | 0.71 | 2.69 | 4.29 | 1.99 | 0.57 | 0.87 | 1.12 | 1.21 | 1.79 | 1.07 | 1.16 | 1.57 | 1.56 | 1.06 | 0.98 | 0.93 |
| 10 | p1F8 | 1.69 | 0.60 | 2.33 | 0.81 | 1.22 | 2.39 | 3.16 | 0.91 | 0.91 | 1.82 | 0.33 | 1.03 | 1.98 | 1.33 | 2.23 | 3.62 |
| 12 | p1F5 | 1.46 | 0.57 | 1.93 | 0.41 | 0.96 | 1.83 | 2.23 | 0.85 | 0.86 | 0.75 | 0.63 | 0.81 | 0.81 | 2.06 | 2.83 | 1.93 |
| 14 | p1F18 | 0.90 | 0.31 | 0.40 | 0.27 | 0.78 | 1.21 | 1.00 | 1.33 | 1.41 | 1.00 | 1.16 | 1.67 | 1.54 | 1.04 | 1.01 | 1.04 |
| 16 | p1F7 | 0.05 | 0.81 | 0.86 | 0.52 | 0.01 | 0.03 | 0.02 | 1.87 | 1.16 | 1.17 | 3.87 | 5.09 | 6.00 | 1.13 | 1.59 | 1.52 |
| 18 | p1F21 | 6.25 | 3.00 | 5.81 | 5.25 | 2.78 | 6.02 | 8.14 | 1.90 | 2.11 | 0.96 | 0.87 | 1.43 | 1.29 | 0.92 | 1.34 | 1.01 |
| 20 | p1F9 | 0.81 | 0.66 | 2.81 | 2.93 | 0.30 | 4.24 | 1.98 | 1.26 | 3.69 | 6.69 | 0.93 | 2.81 | 4.90 | 0.76 | 1.30 | 1.41 |
| 22 | p1E13 | 3.44 | 0.77 | 0.91 | 0.52 | 4.94 | 5.66 | 7.44 | 0.80 | 0.76 | 0.83 | 0.48 | 0.48 | 0.53 | 1.25 | 1.37 | 1.45 |
| 24 | p1D1 | 0.79 | 0.84 | 1.45 | 1.75 | 0.06 | 0.08 | 0.15 | 0.18 | 0.21 | 2.61 | 0.41 | 1.22 | 2.15 | 0.52 | 1.53 | 2.90 |
| 24 | p1D2 | 0.36 | 0.45 | 0.69 | 1.35 | 0.14 | 0.14 | 0.20 | 0.91 | 1.82 | 6.00 | 0.71 | 2.33 | 2.12 | 1.15 | 2.37 | 4.15 |
| 26 | p1D4 | 0.96 | 4.30 | 30.5 | 28.2 | 0.07 | 0.88 | 1.59 | 0.17 | 0.22 | 2.68 | 0.96 | 4.76 | 10.5 | 0.28 | 1.01 | 0.69 |
| 28 | p1D9 | 0.93 | 2.44 | 6.15 | 2.16 | 0.70 | 0.60 | 0.74 | 0.54 | 0.39 | 0.50 | 0.91 | 1.08 | 1.35 | 0.74 | 0.78 | 0.77 |
| 30 | p1D12 | 5.05 | 0.20 | 0.50 | 0.28 | 1.23 | 1.20 | 1.70 | 0.25 | 0.35 | 0.36 | 0.27 | 0.76 | 1.01 | 0.94 | 1.09 | 1.10 |
| 32 | p1D15 | 1.10 | 1.18 | 1.98 | 1.14 | 0.33 | 0.44 | 0.53 | 1.73 | 1.72 | 1.69 | 2.13 | 4.23 | 8.70 | 1.24 | 1.31 | 1.89 |
| 34 | p1D16 | 1.42 | 1.67 | 4.88 | 1.93 | 0.70 | 0.86 | 1.12 | 0.33 | 0.24 | 2.10 | 0.73 | 1.20 | 1.81 | 0.48 | 0.88 | 1.28 |
| 36 | p1J13 | 0.46 | 1.61 | 2.09 | 0.97 | 0.58 | 0.55 | 0.60 | 2.18 | 1.53 | 0.88 | 1.41 | 1.42 | 1.10 | 1.49 | 1.21 | 0.96 |
| 38 | p1I22 | 0.82 | 0.58 | 0.59 | 0.16 | 0.48 | 1.16 | 0.82 | 1.45 | 0.97 | 0.85 | 0.87 | 0.96 | 1.00 | 2.15 | 1.26 | 1.26 |
| 40 | p1J6 | 1.48 | 0.60 | 0.33 | 0.39 | 1.79 | 1.70 | 1.50 | 0.88 | 1.23 | 0.75 | 0.63 | 0.48 | 0.75 | 0.98 | 0.93 | 0.99 |
| 42 | p1I5 | 0.86 | 0.52 | 1.00 | 0.31 | 0.35 | 0.56 | 0.55 | 0.90 | 1.09 | 0.56 | 0.81 | 0.65 | 0.38 | 1.71 | 2.18 | 1.36 |
| 44 | p1I13 | 3.69 | 0.66 | 0.22 | 0.09 | 0.80 | 0.86 | 0.71 | 1.71 | 0.85 | 0.82 | 1.23 | 0.92 | 0.65 | 0.77 | 0.81 | 0.53 |
| 46 | p1I17 | 0.64 | 0.74 | 0.71 | 0.42 | 0.54 | 0.75 | 0.73 | 1.67 | 1.42 | 2.09 | 1.44 | 1.48 | 1.22 | 2.14 | 2.56 | 1.78 |
| 48 | p1I15 | 0.31 | 2.06 | 1.98 | 0.44 | 0.29 | 0.24 | 0.22 | 2.30 | 1.31 | 0.96 | 1.57 | 0.94 | 0.41 | 0.94 | 0.80 | 0.45 |
| 50 | p1I7 | 0.37 | 1.86 | 1.54 | 1.42 | 0.28 | 0.36 | 0.49 | 3.38 | 2.22 | 2.73 | 2.24 | 2.29 | 2.35 | 1.19 | 0.94 | 0.91 |
| 54 | p1I4 | 1.05 | 1.83 | 1.14 | 0.40 | 0.74 | 0.78 | 0.93 | 2.06 | 1.20 | 0.52 | 1.57 | 0.90 | 0.39 | 1.25 | 1.21 | 1.06 |
| 56 | p1I8 | 1.50 | 0.31 | 0.27 | 0.27 | 0.46 | 0.50 | 0.59 | 0.90 | 1.14 | 0.84 | 0.36 | 0.50 | 0.56 | 1.24 | 1.76 | 1.35 |
| 58 | p1I16 | 0.99 | 10.6 | 17.9 | 4.96 | 0.51 | 0.73 | 0.42 | 0.83 | 0.79 | 0.42 | 2.34 | 3.52 | 2.38 | 1.54 | 1.61 | 1.06 |
| 60 | p1I11 | 0.57 | 1.13 | 1.47 | 0.49 | 0.64 | 0.61 | 0.55 | 3.68 | 2.80 | 2.80 | 1.54 | 1.51 | 1.07 | 1.89 | 1.81 | 1.62 |
| 62 | p1E8 | 0.66 | 1.23 | 1.31 | 0.97 | 0.41 | 0.63 | 0.57 | 1.93 | 1.25 | 1.44 | 1.50 | 2.35 | 2.34 | 0.98 | 1.19 | 0.98 |
| 64 | p1E18 | 6.48 | 0.46 | 0.48 | 0.34 | 2.58 | 2.30 | 3.06 | 1.14 | 0.78 | 0.72 | 0.51 | 0.62 | 0.68 | 1.56 | 1.91 | 1.78 |
| 66 | p1E16 | 1.01 | 3.17 | 3.38 | 1.75 | 0.16 | 0.53 | 0.90 | 0.18 | 0.22 | 0.17 | 0.75 | 1.05 | 1.15 | 1.25 | 1.08 | 1.31 |
| 68 | p1D5 | 0.98 | 0.47 | 0.82 | 0.51 | 0.52 | 0.74 | 0.71 | 1.13 | 0.91 | 1.23 | 1.18 | 1.58 | 1.21 | 1.05 | 1.24 | 1.13 |
| 68 | p1D6 | 2.56 | 1.76 | 11.9 | 9.56 | 0.51 | 1.35 | 2.15 | 0.10 | 0.13 | 1.08 | 0.39 | 1.28 | 3.59 | 0.26 | 0.39 | 1.00 |
| 70 | p1E12 | 1.03 | 0.67 | 1.66 | 0.89 | 0.53 | 0.88 | 1.07 | 1.27 | 1.41 | 1.18 | 1.21 | 1.59 | 1.86 | 1.11 | 1.20 | 1.06 |
| 72 | p1E10 | 0.91 | 1.62 | 1.31 | 0.79 | 0.60 | 0.78 | 0.79 | 0.74 | 0.70 | 0.48 | 2.12 | 0.88 | 1.20 | 1.37 | 1.53 | 1.27 |
| 74 | p1C21 | 2.86 | 0.60 | 0.66 | 0.49 | 0.60 | 0.65 | 0.85 | 0.41 | 0.49 | 0.15 | 1.16 | 1.65 | 0.93 | 1.09 | 1.12 | 1.00 |
| 76 | p1D10 | 0.89 | 1.45 | 2.68 | 2.94 | 0.35 | 0.35 | 0.53 | 0.75 | 1.64 | 3.48 | 0.80 | 4.59 | 6.54 | 0.50 | 1.17 | 1.22 |
| 78 | p1D13 | 0.82 | 0.50 | 0.76 | 0.45 | 0.15 | 0.27 | 0.42 | 0.52 | 2.31 | 2.24 | 1.08 | 3.73 | 2.25 | 0.92 | 2.02 | 2.80 |
| 80 | p1E9 | 6.19 | 0.25 | 0.42 | 0.18 | 2.33 | 3.63 | 5.01 | 0.93 | 0.80 | 0.85 | 0.57 | 0.61 | 0.61 | 1.58 | 1.37 | 1.17 |
| 82 | p1F1 | 0.51 | 0.91 | 0.90 | 0.30 | 0.34 | 0.53 | 0.66 | 1.66 | 1.23 | 1.06 | 1.46 | 1.58 | 1.03 | 1.25 | 1.24 | 1.06 |
| 84 | p1E7 | 0.86 | 0.87 | 2.06 | 1.32 | 0.03 | 0.75 | 1.20 | 0.04 | 0.05 | 0.04 | 3.09 | 2.60 | 3.60 | 0.60 | 0.70 | 0.74 |
| 86 | p1E6 | 0.85 | 0.58 | 2.26 | 2.67 | 0.25 | 0.57 | 0.65 | 0.46 | 0.52 | 0.82 | 1.89 | 1.89 | 3.91 | 1.17 | 1.42 | 1.57 |
| 88 | p2B1 | 0.77 | 0.97 | 1.30 | 0.60 | 0.65 | 0.87 | 0.56 | 44.4 | 43.0 | 40.8 | 1.00 | 0.82 | 0.90 | 2.60 | 2.73 | 2.05 |
| 90 | p1D14 | 0.52 | 0.58 | 1.23 | 1.29 | 0.24 | 0.75 | 0.72 | 3.09 | 9.75 | 4.95 | 2.47 | 5.03 | 3.55 | 0.79 | 2.49 | 2.20 |
| 92 | p1D17 | 5.77 | 0.58 | 1.01 | 0.76 | 0.98 | 1.26 | 1.31 | 0.35 | 0.56 | 0.65 | 0.79 | 2.26 | 4.40 | 0.83 | 1.71 | 0.82 |
| 92 | p1P14 | 0.68 | 2.63 | 11.8 | 5.90 | 0.14 | 0.71 | 0.84 | 1.46 | 1.93 | 3.86 | 4.65 | 15.4 | 34.0 | 0.82 | 2.07 | 1.12 |
| 94 | p1C24 | 3.67 | 1.02 | 2.70 | 1.61 | 1.06 | 1.66 | 0.88 | 1.22 | 0.95 | 1.30 | 0.77 | 0.67 | 0.81 | 1.31 | 1.62 | 1.57 |
| 96 | p1D3 | 5.80 | 5.79 | 9.49 | 5.80 | 3.32 | 3.26 | 5.79 | 0.36 | 0.29 | 0.54 | 0.38 | 0.42 | 0.77 | 0.67 | 0.93 | 0.98 |
| 98 | p1E14 | 2.54 | 1.20 | 9.33 | 2.55 | 0.38 | 0.74 | 1.03 | 0.80 | 0.74 | 0.82 | 0.76 | 0.94 | 0.99 | 1.32 | 1.63 | 1.27 |
| 100 | p1E20 | 0.37 | 1.33 | 1.44 | 0.65 | 0.23 | 0.43 | 0.33 | 0.97 | 1.30 | 1.16 | 0.94 | 1.89 | 1.78 | 1.12 | 1.51 | 1.34 |
| 102 | p1A24 | 0.38 | 0.37 | 0.40 | 0.20 | 0.18 | 0.26 | 0.17 | 1.73 | 1.59 | 1.32 | 1.60 | 1.85 | 1.36 | 1.36 | 1.95 | 1.44 |
| 104 | p1E17 | 0.90 | 0.29 | 0.39 | 0.24 | 1.96 | 2.03 | 2.06 | 1.27 | 1.47 | 0.91 | 1.13 | 1.31 | 1.33 | 0.97 | 1.19 | 1.01 |
| 106 | p1E19 | 1.08 | 0.41 | 0.50 | 0.32 | 0.38 | 0.90 | 0.47 | 1.30 | 1.11 | 1.17 | 1.29 | 1.52 | 1.39 | 1.14 | 1.69 | 1.39 |
| 108 | p1E15 | 1.27 | 1.12 | 1.01 | 0.85 | 0.52 | 0.65 | 1.11 | 0.44 | 0.56 | 0.30 | 0.28 | 0.29 | 0.32 | 0.93 | 1.05 | 0.75 |
| 110 | p1E11 | 2.90 | 0.63 | 0.64 | 0.34 | 0.64 | 1.47 | 1.35 | 1.18 | 1.16 | 0.64 | 0.74 | 0.79 | 0.88 | 1.79 | 2.49 | 1.93 |
| 112 | p1E23 | 0.48 | 0.88 | 1.02 | 0.73 | 0.30 | 0.55 | 0.66 | 3.17 | 2.93 | 2.98 | 1.21 | 2.36 | 2.53 | 2.23 | 2.61 | 2.23 |
| 114 | p1E21 | 0.67 | 0.35 | 0.34 | 0.21 | 0.56 | 1.14 | 0.89 | 1.52 | 1.62 | 1.30 | 1.42 | 1.69 | 1.38 | 1.02 | 1.32 | 1.03 |
| 116 | p1D23 | 0.34 | 0.80 | 0.85 | 0.66 | 0.39 | 0.49 | 0.53 | 2.49 | 2.28 | 1.52 | 1.02 | 1.77 | 1.19 | 1.25 | 1.21 | 1.17 |
| 118 | p1D24 | 0.96 | 0.71 | 0.79 | 0.49 | 0.53 | 0.90 | 0.93 | 0.81 | 0.51 | 0.43 | 4.63 | 10.9 | 11.79 | 1.85 | 2.23 | 1.65 |
| 120 | p1D22 | 0.84 | 0.92 | 2.62 | 2.82 | 0.32 | 1.26 | 2.00 | 2.03 | 7.51 | 5.60 | 0.91 | 3.88 | 6.11 | 0.62 | 2.09 | 2.39 |
| 122 | p1E2 | 0.68 | 0.51 | 0.58 | 0.32 | 0.53 | 0.51 | 0.68 | 3.13 | 2.02 | 1.22 | 1.15 | 1.93 | 1.52 | 0.93 | 0.61 | 0.59 |
| 124 | p1E1 | 1.25 | 0.29 | 0.42 | 0.29 | 0.28 | 0.47 | 0.91 | 1.03 | 1.24 | 0.88 | 0.32 | 0.61 | 0.60 | 3.03 | 4.39 | 2.33 |
| 126 | p1E4 | 1.21 | 1.65 | 1.17 | 0.82 | 0.74 | 1.28 | 1.71 | 0.95 | 0.97 | 0.93 | 0.78 | 1.35 | 1.44 | 1.30 | 1.48 | 1.35 |
| 128 | p1D18 | 2.33 | 0.61 | 1.12 | 0.59 | 0.21 | 0.47 | 0.44 | 0.47 | 0.56 | 0.34 | 0.81 | 0.66 | 0.93 | 1.67 | 2.06 | 1.43 |
| 130 | p1D21 | 1.58 | 0.75 | 0.63 | 0.26 | 0.63 | 0.94 | 1.35 | 1.42 | 1.59 | 1.61 | 4.36 | 8.21 | 7.50 | 0.98 | 1.29 | 1.38 |
| 132 | p1C22 | 3.39 | 0.24 | 0.24 | 0.21 | 1.34 | 1.44 | 2.22 | 0.54 | 0.74 | 0.36 | 0.34 | 0.38 | 0.45 | 0.93 | 1.16 | 0.89 |
| 134 | p1C23 | 0.85 | 0.87 | 1.53 | 0.69 | 0.31 | 0.63 | 0.59 | 1.02 | 0.68 | 1.28 | 1.64 | 2.00 | 2.74 | 1.27 | 1.80 | 1.29 |
| 136 | p1D11 | 0.90 | 0.33 | 2.31 | 1.23 | 0.26 | 1.00 | 1.34 | 0.38 | 0.41 | 1.04 | 0.49 | 2.07 | 2.79 | 0.86 | 1.77 | 1.60 |
| 138 | p1E3 | 3.29 | 0.99 | 0.43 | 0.18 | 5.87 | 6.74 | 7.79 | 0.35 | 0.44 | 0.17 | 1.79 | 0.50 | 0.31 | 2.09 | 1.61 | 1.29 |
| 140 | p1D20 | 0.78 | 1.34 | 1.76 | 0.65 | 0.34 | 0.71 | 0.72 | 2.43 | 2.48 | 1.46 | 0.66 | 1.80 | 1.75 | 3.27 | 3.69 | 4.17 |
| 142 | p1E5 | 3.83 | 0.83 | 1.03 | 0.57 | 0.83 | 1.57 | 1.37 | 0.67 | 0.70 | 0.68 | 0.55 | 0.64 | 0.78 | 1.19 | 1.55 | 1.19 |
| 144 | p1D19 | 1.97 | 0.16 | 0.12 | 0.14 | 0.80 | 1.04 | 1.08 | 0.46 | 0.58 | 0.25 | 0.49 | 0.46 | 0.59 | 1.34 | 1.62 | 1.22 |
| 146 | p2A15 | 0.54 | 0.64 | 0.82 | 0.41 | 0.64 | 0.39 | 0.40 | 1.61 | 1.48 | 1.44 | 2.08 | 2.36 | 2.45 | 1.01 | 1.17 | 1.02 |
| 148 | p1I14 | 0.26 | 2.20 | 3.06 | 1.28 | 0.15 | 0.27 | 0.19 | 1.67 | 1.28 | 0.67 | 1.87 | 2.43 | 1.77 | 1.06 | 1.00 | 0.68 |
| 150 | p1I2 | 0.93 | 1.17 | 1.93 | 0.88 | 0.16 | 0.30 | 0.31 | 1.14 | 1.13 | 1.01 | 0.36 | 0.55 | 0.54 | 3.57 | 5.13 | 2.75 |
| 152 | p1I12 | 2.71 | 0.54 | 0.27 | 0.32 | 2.90 | 3.25 | 2.42 | 0.62 | 0.85 | 0.44 | 0.36 | 0.34 | 0.40 | 0.87 | 1.00 | 0.87 |
| 154 | p1I3 | 0.76 | 0.94 | 1.64 | 0.59 | 0.45 | 0.72 | 0.52 | 1.46 | 1.20 | 0.61 | 0.88 | 0.93 | 0.81 | 1.46 | 1.81 | 1.11 |
| 156 | p1I10 | 0.85 | 1.50 | 1.17 | 0.73 | 0.92 | 0.90 | 1.14 | 4.02 | 4.49 | 4.46 | 0.33 | 0.26 | 0.34 | 1.22 | 1.28 | 0.89 |
| 158 | p1H18 | 0.22 | 1.07 | 0.49 | 0.15 | 0.65 | 0.80 | 1.00 | 1.71 | 1.19 | 0.75 | 1.47 | 0.95 | 0.79 | 1.78 | 1.45 | 1.00 |
| 160 | p1H24 | 4.74 | 0.93 | 0.84 | 0.50 | 0.76 | 0.89 | 1.07 | 1.06 | 0.87 | 0.78 | 0.90 | 0.62 | 0.50 | 1.24 | 1.24 | 0.87 |
| 162 | p1E22 | 1.62 | 1.04 | 1.05 | 0.62 | 0.85 | 1.66 | 1.16 | 1.07 | 1.02 | 0.90 | 1.01 | 1.27 | 1.27 | 1.05 | 1.39 | 0.89 |
| 164 | p1H21 | 12.1 | 0.34 | 0.94 | 0.49 | 0.32 | 0.82 | 2.11 | 0.63 | 1.14 | 1.03 | 0.80 | 1.43 | 2.23 | 1.28 | 1.97 | 1.15 |
| 166 | p1I1 | 1.37 | 0.52 | 0.45 | 0.30 | 1.22 | 1.28 | 1.73 | 0.98 | 0.70 | 0.51 | 0.66 | 0.51 | 0.77 | 2.16 | 2.43 | 1.44 |
| 168 | p1H14 | 0.35 | 1.14 | 1.18 | 1.02 | 0.30 | 0.42 | 0.37 | 3.00 | 3.19 | 1.59 | 1.71 | 2.48 | 2.09 | 1.35 | 1.56 | 0.99 |
| 170 | p1H11 | 0.74 | 0.24 | 0.41 | 0.22 | 0.42 | 0.68 | 0.92 | 1.28 | 1.28 | 1.26 | 2.20 | 2.56 | 1.81 | 1.12 | 1.13 | 0.97 |
| 172 | p1H17 | 0.24 | 1.28 | 0.58 | 0.15 | 0.77 | 0.80 | 0.85 | 1.58 | 0.98 | 0.67 | 1.43 | 1.10 | 0.82 | 1.49 | 1.02 | 0.71 |
| 174 | p1H12 | 1.03 | 1.02 | 1.56 | 0.71 | 0.58 | 0.95 | 0.61 | 0.93 | 1.28 | 1.16 | 0.51 | 0.63 | 0.76 | 2.85 | 3.33 | 2.57 |
| 176 | p1H7 | 0.31 | 0.35 | 0.20 | 0.11 | 0.54 | 0.71 | 0.76 | 1.81 | 1.40 | 1.00 | 1.11 | 0.77 | 0.96 | 2.27 | 1.45 | 1.10 |
| 178 | p1H15 | 2.35 | 0.61 | 0.32 | 0.18 | 1.05 | 1.30 | 1.88 | 1.00 | 0.73 | 0.43 | 0.83 | 0.48 | 0.37 | 1.77 | 1.51 | 0.96 |
| 180 | p1H20 | 0.25 | 1.42 | 0.56 | 0.18 | 0.72 | 0.91 | 0.93 | 1.69 | 1.41 | 1.01 | 1.29 | 0.91 | 0.81 | 2.25 | 1.41 | 1.08 |
| 182 | p1H8 | 0.42 | 0.15 | 0.06 | 0.03 | 0.94 | 0.98 | 1.07 | 0.87 | 0.57 | 0.32 | 0.78 | 0.44 | 0.67 | 2.28 | 1.78 | 1.17 |
| 184 | p1H16 | 0.76 | 0.85 | 0.99 | 0.58 | 0.93 | 1.24 | 0.88 | 1.55 | 1.06 | 1.70 | 0.63 | 0.51 | 1.04 | 1.51 | 1.13 | 1.21 |
| 186 | p1H9 | 0.47 | 1.26 | 1.82 | 1.00 | 0.38 | 0.46 | 0.73 | 3.02 | 1.86 | 2.13 | 2.67 | 3.21 | 2.86 | 1.66 | 1.28 | 0.87 |
| 188 | p1H23 | 0.38 | 1.16 | 1.05 | 0.99 | 0.38 | 0.46 | 0.53 | 4.59 | 3.73 | 1.67 | 1.90 | 4.02 | 2.27 | 1.30 | 1.08 | 0.77 |
| 190 | p1H10 | 3.68 | 0.65 | 0.65 | 0.43 | 0.69 | 0.81 | 1.24 | 0.73 | 0.80 | 0.71 | 0.35 | 0.39 | 0.50 | 1.91 | 1.81 | 2.21 |
| 192 | p1H6 | 6.08 | 0.16 | 0.13 | 0.10 | 1.87 | 1.88 | 2.03 | 0.17 | 0.25 | 0.13 | 0.13 | 0.10 | 0.12 | 0.85 | 1.17 | 0.85 |
| 194 | p1H13 | 0.72 | 4.92 | 3.05 | 0.37 | 2.06 | 1.40 | 1.91 | 0.51 | 0.46 | 0.90 | 0.68 | 0.37 | 0.49 | 1.05 | 0.47 | 0.87 |
| 196 | p1H19 | 0.80 | 2.90 | 2.66 | 0.49 | 0.59 | 0.89 | 1.56 | 0.62 | 0.44 | 0.82 | 2.07 | 1.40 | 0.59 | 0.86 | 1.61 | 0.95 |
| 198 | p1G22 | 0.77 | 0.58 | 0.60 | 0.24 | 0.33 | 0.47 | 0.49 | 0.94 | 0.72 | 1.03 | 1.65 | 1.71 | 1.62 | 1.88 | 2.51 | 2.06 |
| 200 | p1G21 | 0.74 | 1.03 | 1.34 | 0.49 | 0.38 | 0.57 | 0.73 | 0.92 | 0.65 | 1.04 | 1.47 | 1.29 | 1.15 | 1.20 | 1.47 | 1.03 |
| 202 | p1H1 | 1.08 | 0.46 | 0.38 | 0.25 | 0.65 | 0.94 | 1.02 | 1.44 | 1.84 | 1.44 | 1.77 | 1.69 | 1.29 | 1.01 | 0.97 | 0.81 |
| 204 | p1G20 | 1.09 | 1.85 | 1.50 | 0.64 | 1.27 | 1.46 | 1.03 | 0.85 | 0.67 | 0.37 | 1.51 | 1.05 | 0.70 | 1.01 | 1.11 | 0.85 |
| 206 | p1H5 | 1.14 | 0.49 | 0.58 | 0.40 | 0.69 | 0.78 | 0.91 | 1.07 | 0.84 | 1.04 | 0.55 | 0.44 | 0.29 | 2.09 | 2.45 | 2.06 |
| 208 | p1G19 | 0.29 | 2.03 | 1.39 | 0.36 | 0.48 | 0.51 | 0.35 | 1.14 | 0.90 | 1.76 | 1.78 | 1.49 | 2.25 | 1.00 | 1.01 | 0.56 |
| 210 | p1H2 | 1.86 | 0.91 | 0.82 | 0.72 | 1.94 | 2.47 | 2.65 | 2.55 | 2.29 | 0.35 | 1.66 | 2.25 | 1.06 | 0.61 | 0.57 | 0.36 |
| 212 | p1G18 | 0.90 | 3.11 | 3.14 | 0.50 | 1.10 | 1.18 | 1.51 | 0.54 | 0.81 | 1.17 | 1.05 | 0.84 | 1.08 | 0.79 | 1.11 | 0.74 |
| 214 | p1H4 | 1.26 | 0.21 | 0.08 | 0.04 | 1.06 | 1.04 | 1.37 | 0.81 | 0.78 | 0.44 | 0.69 | 0.54 | 0.45 | 1.26 | 0.89 | 0.74 |
| 216 | p1H3 | 2.12 | 0.84 | 0.35 | 0.14 | 1.34 | 1.57 | 2.53 | 1.32 | 0.67 | 0.44 | 1.11 | 0.48 | 0.44 | 2.21 | 1.52 | 0.90 |
| 222 | p1P3 | 1.92 | 0.44 | 0.79 | 0.38 | 0.27 | 0.44 | 0.66 | 0.47 | 0.55 | 0.30 | 7.15 | 7.93 | 6.97 | 1.12 | 1.18 | 1.12 |
| 224 | p1A9 | 0.79 | 1.08 | 2.70 | 3.21 | 0.06 | 0.35 | 0.47 | 0.16 | 0.20 | 1.42 | 0.79 | 1.64 | 3.82 | 0.72 | 1.78 | 3.33 |
| 224 | p1A8 | 6.46 | 4.52 | 37.2 | 24.2 | 0.63 | 1.17 | 1.40 | 0.13 | 0.14 | 0.44 | 0.27 | 0.49 | 1.37 | 0.39 | 0.56 | 1.59 |
| 226 | p1B17 | 6.59 | 27.2 | 223 | 109 | 0.51 | 1.00 | 0.68 | 0.81 | 0.85 | 0.86 | 0.83 | 1.22 | 2.43 | 0.86 | 1.55 | 1.09 |
| 228 | p1O20 | 0.27 | 4.25 | 7.39 | 5.74 | 0.09 | 0.44 | 0.44 | 1.19 | 14.2 | 31.1 | 5.43 | 8.1 | 15.1 | 0.68 | 2.46 | 5.18 |
| 230 | p1B2 | 0.99 | 7.01 | 22.2 | 28.8 | 0.33 | 0.98 | 1.70 | 0.44 | 0.54 | 2.32 | 0.67 | 4.52 | 13.0 | 0.51 | 1.10 | 1.44 |
| 232 | p1B3 | 0.85 | 0.33 | 1.27 | 1.04 | 0.09 | 0.42 | 1.08 | 0.33 | 0.41 | 3.73 | 0.97 | 1.72 | 1.54 | 0.84 | 1.63 | 2.88 |
| 236 | p1B19 | 0.07 | 0.36 | 2.23 | 1.77 | 0.01 | 0.03 | 0.06 | 0.01 | 0.01 | 0.01 | 1.23 | 0.69 | 3.23 | 0.80 | 2.03 | 1.54 |
| 236 | p1B18 | 0.89 | 2.35 | 29.2 | 13.7 | 0.20 | 0.34 | 0.39 | 0.17 | 0.17 | 0.15 | 0.21 | 0.17 | 0.69 | 1.36 | 0.66 | 1.75 |
| 238 | p1N17 | 1.67 | 3.14 | 3.81 | 8.23 | 0.41 | 0.43 | 0.63 | 0.35 | 0.37 | 0.23 | 0.16 | 0.18 | 0.21 | 0.71 | 0.86 | 1.73 |
| 240 | p1A24 | 3.26 | 0.37 | 1.01 | 0.74 | 0.44 | 0.77 | 1.17 | 0.10 | 0.13 | 0.08 | 1.85 | 0.91 | 2.15 | 0.66 | 1.03 | 0.82 |
| 244 | p1B1 | 1.42 | 0.65 | 2.03 | 1.31 | 0.01 | 0.74 | 1.05 | 0.03 | 0.02 | 0.04 | 2.53 | 1.72 | 2.76 | 0.61 | 1.04 | 0.88 |
| 248 | p1A4 | 0.84 | 0.22 | 1.78 | 1.26 | 0.31 | 0.89 | 0.94 | 1.14 | 1.97 | 0.82 | 2.22 | 2.17 | 3.25 | 1.70 | 2.50 | 2.14 |
| 248 | p1A2 | 3.47 | 0.51 | 12.1 | 8.87 | 0.33 | 2.30 | 2.64 | 0.86 | 1.50 | 0.70 | 0.91 | 1.32 | 2.58 | 0.58 | 0.80 | 0.86 |
| 248 | p1A3 | 5.15 | 1.31 | 31.9 | 18.8 | 0.41 | 4.16 | 5.14 | 1.20 | 1.46 | 0.63 | 0.63 | 1.50 | 2.78 | 0.52 | 0.97 | 1.02 |
| 248 | p1A1 | 10.0 | 1.02 | 49.3 | 22.8 | 0.76 | 4.24 | 4.31 | 0.75 | 0.62 | 0.72 | 0.53 | 0.70 | 2.19 | 0.87 | 0.94 | 1.07 |
| 250 | p1A16 | 5.53 | 0.80 | 9.87 | 6.89 | 0.39 | 1.20 | 1.04 | 0.55 | 0.56 | 1.34 | 0.58 | 0.85 | 3.22 | 0.91 | 1.02 | 1.08 |
| 250 | p1A15 | 6.09 | 0.90 | 5.67 | 6.24 | 0.29 | 2.68 | 3.57 | 0.83 | 2.06 | 13.2 | 0.73 | 2.53 | 7.79 | 0.18 | 1.20 | 1.04 |
| 250 | p1A18 | 4.95 | 1.01 | 4.25 | 7.77 | 0.50 | 2.95 | 4.85 | 2.05 | 8.73 | 12.21 | 1.02 | 2.75 | 7.82 | 0.31 | 0.84 | 0.85 |
| 250 | p1A17 | 22.0 | 1.16 | 34.1 | 13.81 | 1.85 | 4.66 | 2.89 | 1.18 | 0.95 | 0.90 | 0.76 | 1.10 | 2.00 | 1.02 | 1.40 | 1.08 |
| 252 | p1B14 | 0.22 | 0.45 | 0.65 | 1.54 | 0.84 | 6.03 | 2.44 | 0.04 | 0.05 | 0.05 | 2.81 | 1.35 | 4.13 | 0.30 | 0.29 | 0.30 |
| 252 | p1B15 | 0.24 | 0.34 | 0.46 | 0.83 | 0.54 | 4.88 | 2.25 | 0.05 | 0.05 | 0.06 | 8.90 | 3.01 | 8.69 | 1.01 | 0.68 | 0.91 |
| 252 | p1B16 | 0.24 | 0.47 | 0.45 | 1.35 | 0.78 | 5.19 | 2.01 | 0.05 | 0.04 | 0.06 | 8.93 | 3.67 | 13.9 | 0.95 | 0.67 | 0.82 |
| 254 | p1A12 | 1.06 | 2.50 | 3.37 | 4.51 | 0.19 | 0.38 | 1.19 | 0.37 | 0.63 | 2.83 | 0.92 | 2.17 | 3.37 | 0.60 | 1.03 | 1.69 |
| 254 | p1A11 | 26.9 | 6.17 | 142 | 62.4 | 2.33 | 5.10 | 6.21 | 0.13 | 0.22 | 0.81 | 0.17 | 0.44 | 1.01 | 0.53 | 0.29 | 1.22 |
| 256 | p1A13 | 3.13 | 1.49 | 4.12 | 4.95 | 0.92 | 1.18 | 2.38 | 0.06 | 0.06 | 1.27 | 0.29 | 0.81 | 2.00 | 0.21 | 0.36 | 1.05 |
| 258 | p1A14 | 7.75 | 6.29 | 28.0 | 29.3 | 4.13 | 5.41 | 7.32 | 0.17 | 0.24 | 0.33 | 0.11 | 0.23 | 0.77 | 0.59 | 0.39 | 0.89 |
| 260 | p1A19 | 15.7 | 1.21 | 33.7 | 4.98 | 0.74 | 5.11 | 2.30 | 0.68 | 0.81 | 0.61 | 0.43 | 0.56 | 0.52 | 0.86 | 0.64 | 0.89 |
| 262 | p1A20 | 4.93 | 3.33 | 10.0 | 7.74 | 0.98 | 1.70 | 2.70 | 0.08 | 0.08 | 0.12 | 0.08 | 0.14 | 0.57 | 0.38 | 0.18 | 1.26 |
| 264 | p1A22 | 0.87 | 0.84 | 1.41 | 1.18 | 0.07 | 0.24 | 0.32 | 0.61 | 1.92 | 3.26 | 2.03 | 4.60 | 4.51 | 0.75 | 2.15 | 3.17 |
| 266 | p1A23 | 1.14 | 1.34 | 4.67 | 2.78 | 0.02 | 0.79 | 1.41 | 0.01 | 0.01 | 0.01 | 1.17 | 0.96 | 2.10 | 0.13 | 0.23 | 0.21 |
| 268 | p1B21 | 165 | 0.17 | 0.31 | 0.17 | 1.35 | 3.24 | 55.7 | 0.37 | 0.40 | 0.27 | 28.9 | 30.2 | 86.8 | 0.90 | 1.00 | 0.67 |
| 268 | p1B20 | 2952 | 1.05 | 3.07 | 1.20 | 17.5 | 32.8 | 682 | 0.76 | 0.85 | 1.29 | 45.1 | 42.8 | 224 | 1.14 | 0.96 | 1.15 |
| 270 | p1C17 | 5.82 | 3.02 | 5.66 | 2.13 | 4.54 | 4.06 | 4.88 | 0.46 | 0.55 | 0.59 | 0.80 | 0.95 | 1.70 | 0.92 | 0.83 | 1.03 |
| 270 | p1C18 | 8.06 | 2.62 | 7.14 | 2.17 | 3.71 | 3.18 | 4.70 | 0.45 | 0.66 | 0.69 | 0.67 | 1.03 | 1.59 | 0.91 | 1.00 | 0.96 |
| 272 | p1D8 | 2.31 | 0.09 | 0.17 | 0.18 | 1.11 | 1.09 | 1.50 | 0.62 | 0.97 | 0.73 | 0.27 | 0.44 | 0.80 | 1.16 | 1.31 | 1.07 |
| 274 | p1A10 | 3.43 | 0.14 | 2.68 | 4.91 | 0.12 | 0.78 | 1.90 | 0.53 | 0.36 | 6.58 | 0.90 | 5.24 | 22.3 | 3.10 | 0.91 | 2.13 |
| 276 | p1G24 | 1.02 | 0.42 | 1.73 | 0.82 | 0.17 | 0.45 | 0.48 | 0.62 | 1.04 | 1.26 | 0.48 | 1.02 | 1.36 | 2.79 | 4.68 | 4.49 |
| 278 | p1G23 | 2.13 | 0.90 | 2.33 | 0.80 | 0.73 | 1.13 | 1.75 | 0.66 | 0.90 | 0.81 | 0.44 | 0.84 | 0.95 | 1.72 | 2.05 | 1.83 |
| 280 | p1G5 | 0.90 | 1.21 | 3.69 | 3.47 | 0.45 | 1.28 | 2.11 | 0.89 | 2.10 | 4.01 | 0.68 | 2.58 | 5.12 | 0.36 | 1.31 | 1.57 |
| 282 | p1G7 | 0.52 | 1.12 | 1.85 | 1.19 | 0.23 | 0.40 | 0.50 | 1.27 | 0.92 | 1.35 | 1.62 | 2.39 | 1.90 | 0.94 | 1.54 | 1.32 |
| 284 | p2A23 | 2.36 | 0.59 | 0.61 | 0.40 | 0.32 | 0.40 | 0.35 | 1.32 | 1.14 | 0.79 | 0.85 | 0.76 | 0.66 | 1.68 | 2.18 | 1.53 |
| 286 | p1G1 | 0.35 | 0.53 | 0.85 | 0.75 | 1.04 | 1.89 | 1.39 | 1.17 | 1.16 | 0.98 | 0.74 | 0.91 | 0.95 | 1.16 | 1.20 | 1.52 |
| 288 | p1G15 | 4.87 | 0.34 | 0.56 | 0.36 | 1.92 | 1.93 | 1.93 | 0.33 | 0.63 | 0.51 | 0.20 | 0.28 | 0.32 | 0.80 | 1.05 | 0.89 |
| 290 | p1F23 | 0.32 | 0.84 | 0.77 | 0.70 | 0.29 | 0.32 | 0.32 | 1.50 | 1.79 | 1.29 | 2.59 | 2.59 | 1.90 | 1.67 | 1.38 | 1.16 |
| 292 | p1G8 | 0.43 | 0.49 | 0.79 | 0.86 | 0.50 | 0.62 | 0.52 | 13.4 | 14.8 | 10.4 | 1.32 | 4.10 | 3.54 | 0.96 | 2.78 | 2.43 |
| 294 | p1G13 | 9.42 | 0.46 | 0.47 | 0.43 | 2.39 | 2.87 | 3.25 | 0.15 | 0.16 | 0.13 | 0.28 | 0.43 | 0.64 | 0.79 | 1.19 | 0.96 |
| 296 | p1G10 | 0.49 | 0.67 | 0.68 | 0.40 | 0.30 | 0.44 | 0.37 | 1.46 | 0.96 | 0.72 | 2.48 | 2.48 | 1.88 | 1.56 | 1.51 | 1.21 |
| 298 | p1F24 | 0.08 | 2.07 | 1.62 | 1.89 | 0.13 | 0.17 | 0.19 | 0.45 | 0.58 | 0.36 | 1.18 | 1.06 | 1.55 | 6.29 | 6.20 | 4.26 |
| 300 | p1G2 | 0.62 | 0.61 | 0.84 | 0.43 | 0.28 | 0.29 | 0.48 | 0.89 | 0.65 | 1.21 | 0.91 | 0.92 | 0.69 | 2.10 | 2.64 | 2.62 |
| 302 | p1G11 | 0.65 | 3.60 | 4.27 | 4.45 | 0.16 | 0.26 | 0.20 | 5.96 | 8.65 | 5.54 | 11.3 | 18.7 | 26.3 | 0.98 | 1.30 | 1.18 |
| 304 | p1G16 | 0.36 | 0.71 | 1.07 | 0.87 | 0.87 | 1.07 | 1.38 | 8.25 | 8.61 | 5.74 | 0.97 | 2.34 | 3.68 | 1.07 | 1.21 | 1.14 |
| 306 | p1G9 | 1.43 | 1.28 | 1.06 | 1.00 | 0.49 | 1.14 | 1.76 | 0.85 | 0.66 | 0.52 | 1.39 | 1.80 | 2.13 | 0.98 | 1.04 | 0.96 |
| 308 | p1G4 | 2.65 | 0.95 | 1.70 | 1.60 | 0.56 | 0.77 | 0.78 | 2.02 | 0.93 | 0.45 | 1.44 | 3.73 | 5.27 | 4.99 | 7.58 | 9.71 |
| 310 | p1G14 | 4.68 | 0.15 | 0.16 | 0.13 | 1.08 | 1.48 | 1.63 | 0.33 | 0.49 | 0.25 | 0.17 | 0.18 | 0.18 | 0.94 | 1.57 | 1.09 |
| 312 | p1A6 | 1.29 | 0.55 | 2.17 | 2.92 | 0.15 | 0.91 | 1.99 | 0.99 | 2.21 | 1.94 | 1.18 | 3.56 | 5.14 | 0.40 | 1.08 | 1.87 |
| 312 | p1A5 | 3.93 | 0.19 | 0.23 | 0.22 | 0.98 | 1.78 | 3.76 | 0.25 | 0.33 | 0.24 | 0.15 | 0.20 | 0.26 | 1.25 | 1.65 | 1.39 |
| 314 | p1B9 | 4.45 | 0.17 | 0.47 | 0.17 | 5.52 | 18.9 | 19.0 | 0.16 | 0.16 | 0.41 | 0.29 | 0.57 | 4.92 | 0.32 | 0.61 | 1.23 |
| 314 | p1B6 | 8.12 | 1.22 | 2.38 | 1.81 | 10.0 | 25.1 | 16.0 | 0.60 | 0.57 | 0.58 | 0.99 | 1.38 | 2.38 | 0.79 | 0.54 | 0.87 |
| 314 | p1B8 | 7.34 | 0.64 | 1.60 | 1.29 | 5.86 | 21.3 | 21.4 | 0.55 | 0.47 | 0.46 | 0.39 | 0.44 | 1.19 | 0.43 | 0.55 | 1.38 |
| 314 | p1B7 | 12.00 | 1.15 | 2.78 | 1.89 | 21.1 | 41.1 | 42.4 | 0.46 | 0.44 | 0.57 | 0.75 | 0.85 | 1.97 | 0.46 | 0.40 | 0.97 |
| 316 | p1G17 | 0.93 | 1.06 | 1.46 | 0.76 | 0.24 | 0.44 | 0.99 | 1.10 | 0.77 | 0.82 | 2.00 | 2.84 | 3.17 | 0.96 | 0.97 | 1.00 |
| 318 | p1G3 | 0.30 | 1.65 | 1.68 | 1.50 | 0.58 | 0.86 | 1.02 | 0.95 | 0.99 | 1.52 | 1.23 | 1.74 | 3.24 | 1.28 | 0.97 | 1.78 |
| 320 | p1F22 | 0.35 | 0.74 | 0.85 | 0.83 | 0.16 | 0.27 | 0.31 | 1.51 | 1.59 | 0.85 | 2.54 | 3.06 | 3.72 | 1.03 | 1.01 | 0.75 |
| 322 | p1G12 | 0.39 | 1.53 | 2.64 | 2.85 | 0.33 | 0.51 | 0.84 | 1.69 | 3.85 | 4.80 | 0.83 | 3.71 | 5.25 | 1.74 | 2.60 | 3.23 |
| 324 | p1F11 | 0.89 | 0.64 | 0.85 | 0.57 | 0.98 | 1.77 | 1.64 | 2.48 | 2.83 | 1.47 | 0.46 | 0.74 | 0.73 | 1.62 | 1.80 | 1.81 |
| 326 | p1F16 | 3.38 | 1.02 | 0.52 | 0.21 | 7.19 | 6.39 | 9.11 | 0.31 | 0.33 | 0.16 | 1.44 | 0.39 | 0.29 | 1.68 | 1.44 | 1.20 |
| 328 | p1F14 | 0.30 | 1.52 | 3.98 | 3.61 | 1.00 | 1.72 | 1.66 | 0.06 | 0.07 | 0.07 | 3.27 | 4.66 | 10.6 | 1.25 | 1.05 | 1.46 |
| 330 | p1F17 | 1.32 | 11.7 | 16.0 | 9.79 | 0.04 | 0.27 | 1.01 | 0.06 | 0.07 | 0.07 | 0.12 | 0.12 | 0.23 | 1.19 | 2.33 | 1.66 |
| 332 | p1C2 | 2.00 | 0.60 | 2.84 | 1.53 | 7.05 | 9.91 | 9.48 | 0.95 | 18.0 | 39.5 | 0.27 | 1.57 | 3.32 | 0.52 | 0.80 | 0.64 |
| 334 | p1F3 | 0.87 | 0.56 | 0.75 | 0.45 | 0.40 | 0.64 | 0.66 | 1.14 | 0.99 | 0.74 | 0.79 | 1.38 | 1.14 | 1.82 | 2.15 | 1.65 |
| 336 | p1F20 | 0.98 | 2.60 | 4.08 | 2.62 | 1.11 | 1.52 | 2.07 | 0.27 | 0.27 | 0.71 | 0.37 | 0.71 | 1.14 | 0.70 | 0.89 | 1.08 |
| 338 | p1F6 | 0.91 | 0.45 | 1.45 | 0.91 | 0.01 | 0.45 | 0.61 | 0.04 | 0.05 | 0.04 | 2.18 | 2.32 | 3.68 | 0.92 | 1.03 | 0.84 |
| 340 | p1F4 | 5.14 | 2.83 | 2.10 | 1.95 | 0.44 | 0.65 | 0.99 | 0.87 | 0.89 | 0.78 | 0.73 | 0.62 | 0.82 | 1.34 | 1.50 | 1.15 |
| 342 | p1F15 | 1.06 | 0.79 | 1.22 | 0.71 | 0.35 | 0.56 | 0.84 | 1.57 | 1.93 | 0.90 | 1.16 | 1.46 | 2.33 | 1.36 | 1.38 | 0.93 |
| 344 | p1F13 | 0.71 | 0.43 | 1.58 | 1.80 | 0.28 | 1.94 | 2.63 | 2.51 | 14.4 | 12.9 | 0.82 | 6.59 | 7.42 | 1.07 | 3.89 | 3.99 |
| 346 | p1A7 | 2.67 | 5.16 | 9.61 | 4.32 | 1.15 | 2.12 | 2.18 | 0.99 | 0.37 | 0.61 | 1.58 | 1.30 | 1.60 | 1.86 | 2.36 | 1.59 |
| 348 | p1A21 | 0.24 | 0.86 | 1.13 | 1.08 | 0.18 | 0.26 | 0.36 | 0.61 | 0.33 | 0.38 | 1.19 | 1.97 | 1.36 | 2.27 | 2.95 | 3.16 |
| 350 | p1B5 | 0.10 | 0.90 | 1.37 | 1.04 | 0.02 | 0.03 | 0.06 | 0.18 | 0.30 | 1.85 | 1.47 | 1.82 | 3.02 | 1.66 | 3.19 | 3.40 |
| 350 | p1B4 | 0.87 | 3.69 | 9.15 | 4.61 | 0.25 | 0.22 | 0.48 | 0.32 | 0.30 | 0.80 | 0.52 | 0.79 | 2.38 | 1.93 | 1.75 | 5.01 |
| 352 | p1B12 | 1.82 | 0.74 | 0.84 | 1.09 | 0.75 | 1.02 | 0.97 | 0.49 | 0.64 | 0.37 | 1.28 | 1.90 | 1.56 | 1.10 | 1.37 | 1.41 |
| 352 | p1B11 | 1.45 | 1.42 | 2.25 | 1.85 | 0.06 | 0.10 | 0.22 | 0.93 | 1.11 | 1.39 | 2.23 | 3.90 | 3.56 | 2.04 | 2.69 | 3.58 |
| 352 | p1B10 | 3.03 | 1.34 | 6.67 | 4.03 | 1.05 | 1.41 | 1.44 | 0.72 | 0.82 | 0.98 | 0.55 | 0.67 | 0.88 | 0.90 | 1.41 | 1.05 |
| 354 | p1B13 | 1.66 | 1.24 | 1.26 | 0.83 | 1.96 | 1.86 | 2.20 | 0.55 | 0.76 | 0.41 | 0.31 | 0.29 | 0.39 | 0.98 | 0.94 | 1.04 |
| 356 | p1B22 | 0.29 | 2.78 | 2.80 | 2.50 | 0.05 | 0.06 | 0.07 | 0.13 | 0.11 | 0.04 | 0.26 | 0.87 | 0.39 | 3.93 | 3.62 | 4.04 |
| 358 | p1B23 | 8.51 | 1.84 | 6.94 | 6.08 | 1.79 | 2.46 | 3.57 | 0.49 | 0.59 | 0.97 | 0.52 | 1.43 | 4.14 | 0.58 | 0.86 | 0.83 |
| 360 | p1B24 | 1.27 | 1.32 | 1.41 | 1.33 | 0.92 | 1.14 | 1.14 | 4.95 | 2.46 | 1.92 | 2.93 | 3.67 | 5.83 | 0.80 | 0.98 | 0.76 |
| 362 | p1C3 | 0.55 | 1.86 | 2.73 | 1.77 | 0.73 | 1.09 | 1.29 | 0.18 | 0.10 | 0.36 | 1.15 | 1.00 | 1.09 | 1.01 | 2.33 | 1.40 |
| 364 | p1C4 | 1.78 | 0.92 | 6.16 | 1.47 | 0.55 | 0.81 | 0.71 | 1.06 | 0.88 | 0.96 | 0.67 | 0.66 | 0.78 | 1.44 | 2.81 | 1.64 |
| 366 | p1C5 | 0.89 | 0.72 | 1.39 | 1.15 | 0.39 | 0.96 | 1.04 | 1.46 | 1.37 | 1.15 | 1.58 | 3.45 | 4.04 | 0.73 | 1.21 | 0.77 |
| 368 | p1C6 | 19.92 | 1.79 | 28.4 | 14.2 | 2.36 | 5.29 | 5.01 | 0.57 | 0.94 | 1.90 | 0.38 | 0.60 | 1.00 | 0.57 | 0.66 | 0.96 |
| 370 | p1C7 | 1.69 | 2.98 | 11.76 | 3.31 | 1.90 | 1.61 | 1.45 | 0.68 | 0.64 | 0.58 | 0.51 | 0.85 | 0.76 | 0.84 | 1.00 | 0.74 |
| 372 | p1C8 | 1.04 | 1.70 | 7.73 | 8.58 | 0.20 | 0.66 | 0.98 | 0.04 | 0.54 | 3.98 | 3.29 | 9.13 | 21.3 | 0.23 | 1.77 | 1.66 |
| 374 | p1C9 | 1.00 | 0.81 | 1.62 | 1.21 | 0.84 | 0.80 | 1.01 | 0.46 | 0.38 | 0.49 | 0.92 | 1.27 | 1.68 | 1.15 | 1.33 | 1.56 |
| 376 | p1C10 | 28.7 | 0.64 | 1.66 | 0.81 | 1.18 | 2.19 | 2.92 | 0.89 | 1.18 | 1.55 | 0.76 | 0.77 | 1.09 | 0.89 | 0.94 | 0.70 |
| 378 | p1C11 | 1.45 | 1.73 | 11.0 | 5.75 | 0.58 | 0.87 | 0.78 | 0.13 | 0.07 | 0.56 | 0.81 | 1.46 | 3.60 | 1.00 | 1.63 | 1.11 |
| 380 | p1C12 | 3.79 | 0.76 | 24.4 | 7.12 | 0.84 | 1.64 | 0.79 | 0.86 | 0.91 | 0.84 | 0.76 | 0.97 | 1.41 | 1.05 | 0.81 | 1.04 |
| 382 | p1C13 | 2.43 | 0.98 | 2.13 | 1.13 | 1.32 | 2.88 | 3.71 | 0.33 | 0.41 | 0.60 | 0.37 | 0.55 | 0.94 | 1.14 | 0.95 | 2.34 |
| 384 | p1C14 | 2.68 | 2.62 | 7.82 | 2.55 | 1.95 | 1.59 | 1.62 | 0.47 | 0.44 | 0.39 | 0.35 | 0.45 | 1.13 | 0.50 | 0.76 | 0.79 |
| 386 | p1C15 | 0.66 | 0.61 | 0.97 | 0.72 | 0.47 | 0.73 | 0.78 | 30.7 | 28.4 | 10.3 | 2.22 | 5.85 | 6.44 | 1.82 | 1.79 | 1.18 |
| 388 | p1C16 | 1.76 | 0.94 | 25.0 | 14.8 | 0.37 | 0.41 | 0.59 | 0.42 | 0.61 | 0.33 | 0.35 | 0.67 | 1.30 | 0.63 | 1.28 | 0.97 |
| 390 | p1C19 | 26.3 | 4.16 | 5.72 | 3.15 | 1.55 | 1.72 | 4.66 | 0.72 | 0.74 | 0.80 | 0.76 | 1.04 | 1.09 | 0.50 | 0.61 | 0.65 |
| 392 | p1C20 | 0.55 | 0.81 | 1.58 | 1.69 | 0.51 | 0.82 | 1.21 | 0.51 | 0.37 | 1.45 | 1.10 | 3.34 | 4.67 | 0.67 | 2.21 | 1.87 |
| 396 | p1P5 | 0.53 | 0.17 | 0.23 | 0.12 | 0.94 | 0.49 | 0.27 | 0.53 | 0.47 | 0.33 | 6.09 | 2.15 | 4.70 | 0.79 | 0.78 | 0.59 |
| 398 | p2L23 | 0.29 | 2.63 | 1.23 | 1.15 | 0.22 | 0.31 | 0.34 | 0.77 | 0.70 | 0.55 | 28.3 | 15.9 | 28.5 | 2.59 | 2.39 | 2.30 |
| 402 | p1K9 | 0.25 | 1.96 | 1.86 | 1.27 | 0.26 | 0.44 | 0.57 | 0.01 | 0.00 | 0.00 | 0.82 | 1.72 | 0.90 | 1.97 | 2.33 | 1.62 |
| 404 | p1K23 | 0.10 | 3.36 | 1.73 | 1.21 | 0.09 | 0.11 | 0.13 | 0.88 | 0.47 | 0.13 | 2.17 | 2.19 | 3.26 | 1.01 | 0.95 | 0.92 |
| 406 | p1K15 | 17.8 | 0.43 | 0.63 | 0.43 | 0.68 | 1.01 | 4.72 | 0.43 | 0.50 | 0.26 | 0.28 | 0.31 | 0.36 | 1.25 | 1.49 | 1.08 |
| 408 | p1K8 | 0.61 | 0.32 | 0.73 | 0.26 | 3.47 | 2.77 | 0.84 | 0.56 | 0.76 | 0.60 | 0.59 | 0.97 | 0.81 | 1.32 | 1.83 | 1.20 |
| 410 | p1M24 | 1.28 | 0.71 | 1.79 | 0.89 | 0.55 | 1.55 | 1.03 | 0.78 | 0.83 | 0.70 | 0.47 | 0.89 | 0.90 | 1.71 | 3.29 | 1.88 |
| 412 | p1K7 | 0.13 | 1.44 | 0.62 | 0.43 | 0.32 | 0.37 | 0.31 | 2.24 | 1.03 | 0.61 | 3.53 | 2.35 | 1.35 | 1.53 | 1.43 | 0.63 |
| 414 | p1K16 | 0.15 | 0.96 | 1.55 | 1.43 | 0.20 | 0.16 | 0.11 | 3.56 | 2.37 | 1.22 | 2.65 | 3.65 | 1.49 | 1.13 | 1.07 | 0.48 |
| 416 | p1K18 | 1.92 | 0.11 | 0.10 | 0.12 | 0.57 | 1.20 | 1.35 | 0.58 | 0.72 | 0.43 | 0.54 | 0.64 | 0.61 | 0.91 | 1.02 | 0.91 |
| 418 | p1N1 | 0.16 | 0.86 | 0.97 | 0.88 | 0.14 | 0.28 | 0.30 | 2.03 | 1.33 | 1.80 | 1.75 | 2.03 | 1.64 | 1.84 | 1.86 | 1.24 |
| 420 | p1K22 | 0.24 | 1.30 | 1.51 | 0.67 | 0.20 | 0.23 | 0.21 | 1.45 | 1.17 | 0.40 | 1.52 | 1.16 | 1.00 | 1.06 | 1.39 | 0.74 |
| 422 | p1K14 | 1.52 | 0.63 | 0.53 | 0.42 | 1.80 | 1.69 | 1.89 | 0.74 | 1.04 | 0.66 | 0.65 | 0.58 | 0.64 | 1.02 | 0.93 | 1.04 |
| 424 | p1K13 | 0.84 | 0.31 | 0.53 | 0.38 | 0.61 | 0.88 | 0.66 | 0.70 | 0.46 | 0.45 | 1.80 | 1.96 | 1.24 | 1.79 | 1.29 | 0.94 |
| 426 | p1J20 | 0.58 | 1.10 | 0.48 | 0.15 | 0.75 | 0.87 | 1.10 | 1.47 | 0.97 | 0.73 | 1.16 | 0.80 | 0.63 | 1.40 | 1.13 | 0.79 |
| 428 | p1J22 | 2.83 | 0.16 | 0.10 | 0.10 | 2.06 | 2.23 | 1.40 | 0.40 | 0.65 | 0.27 | 0.23 | 0.19 | 0.29 | 1.01 | 0.98 | 0.91 |
| 430 | p1K1 | 1.03 | 1.03 | 4.33 | 3.72 | 0.40 | 0.66 | 0.58 | 1.23 | 1.33 | 1.38 | 1.30 | 0.74 | 1.01 | 0.88 | 0.96 | 0.65 |
| 432 | p1K3 | 34.3 | 0.42 | 0.50 | 0.30 | 10.4 | 12.4 | 16.5 | 0.88 | 0.80 | 0.89 | 0.58 | 0.48 | 0.66 | 1.41 | 1.39 | 1.65 |
| 434 | p1J19 | 4.19 | 0.76 | 0.95 | 0.62 | 21.6 | 18.8 | 17.4 | 0.69 | 0.73 | 0.62 | 0.41 | 0.38 | 0.60 | 2.16 | 2.58 | 1.92 |
| 434 | p1K2 | 4.93 | 1.00 | 0.97 | 0.59 | 25.5 | 24.5 | 22.4 | 0.76 | 0.98 | 0.62 | 0.42 | 0.44 | 0.62 | 2.44 | 2.95 | 1.93 |
| 436 | p1K5 | 0.17 | 1.11 | 1.34 | 0.98 | 0.19 | 0.27 | 0.38 | 2.68 | 2.64 | 2.54 | 1.49 | 1.76 | 1.46 | 1.27 | 1.08 | 1.18 |
| 438 | p1J17 | 1.70 | 0.83 | 0.35 | 0.11 | 1.31 | 1.52 | 2.62 | 1.52 | 0.65 | 0.40 | 1.30 | 0.54 | 0.36 | 2.26 | 1.42 | 0.85 |
| 440 | p1J18 | 2.20 | 1.47 | 0.49 | 0.16 | 1.57 | 2.24 | 3.13 | 2.02 | 0.64 | 0.41 | 1.76 | 0.77 | 0.52 | 3.09 | 2.01 | 0.82 |
| 442 | p1J15 | 0.20 | 0.95 | 0.45 | 0.13 | 0.65 | 0.68 | 0.73 | 1.78 | 1.03 | 0.67 | 1.72 | 0.99 | 0.75 | 1.91 | 1.36 | 0.95 |
| 444 | p1K4 | 0.30 | 2.98 | 2.04 | 0.60 | 0.10 | 0.11 | 0.18 | 1.14 | 0.83 | 1.71 | 1.43 | 1.81 | 2.39 | 1.96 | 3.28 | 3.23 |
| 446 | p2A14 | 1.44 | 0.47 | 0.31 | 0.22 | 1.74 | 1.39 | 1.04 | 0.67 | 0.86 | 0.43 | 0.62 | 0.68 | 0.54 | 0.64 | 0.71 | 0.59 |
| 448 | p1J23 | 2.21 | 21.1 | 25.3 | 28.6 | 9.69 | 14.3 | 8.43 | 0.79 | 0.84 | 0.66 | 0.40 | 0.55 | 0.42 | 1.10 | 1.12 | 0.93 |
| 450 | p1J21 | 0.35 | 1.18 | 0.82 | 0.38 | 0.54 | 0.65 | 0.63 | 1.67 | 1.15 | 0.80 | 1.28 | 0.99 | 0.87 | 1.90 | 1.45 | 1.16 |
| 452 | p1J24 | 0.28 | 1.05 | 0.90 | 0.60 | 0.21 | 0.24 | 0.25 | 2.13 | 1.32 | 0.57 | 1.95 | 1.15 | 0.76 | 2.32 | 2.16 | 1.11 |
| 454 | p1J16 | 0.68 | 0.33 | 0.38 | 0.23 | 0.49 | 0.53 | 0.53 | 0.88 | 0.70 | 0.57 | 1.02 | 0.94 | 0.72 | 1.49 | 1.60 | 1.29 |
| 456 | p1J2 | 0.43 | 1.28 | 1.69 | 0.86 | 0.57 | 0.52 | 0.42 | 2.02 | 2.14 | 1.12 | 1.16 | 2.18 | 1.75 | 1.62 | 1.56 | 0.75 |
| 458 | p1J9 | 3.04 | 0.94 | 1.07 | 0.55 | 9.00 | 11.36 | 7.81 | 1.90 | 1.06 | 0.76 | 0.36 | 0.26 | 0.25 | 0.82 | 0.75 | 1.10 |
| 460 | p1J10 | 0.39 | 0.78 | 0.97 | 0.64 | 1.48 | 1.10 | 0.84 | 1.34 | 0.95 | 0.78 | 1.34 | 1.56 | 1.29 | 1.40 | 1.82 | 1.25 |
| 462 | p1J1 | 0.59 | 0.97 | 1.90 | 0.78 | 0.41 | 0.40 | 0.47 | 7.28 | 5.01 | 2.77 | 1.96 | 3.36 | 2.23 | 1.53 | 1.81 | 1.16 |
| 464 | p1J5 | 1.06 | 0.53 | 0.98 | 0.47 | 0.61 | 0.97 | 0.55 | 0.50 | 0.63 | 0.48 | 1.09 | 0.78 | 1.24 | 1.19 | 0.95 | 1.04 |
| 466 | p1J11 | 1.15 | 1.60 | 2.41 | 1.21 | 0.99 | 1.52 | 0.88 | 1.11 | 1.00 | 0.37 | 2.03 | 2.53 | 2.90 | 3.37 | 2.53 | 2.45 |
| 468 | p1J8 | 0.06 | 0.55 | 0.87 | 1.22 | 0.08 | 0.14 | 0.14 | 3.15 | 2.84 | 1.11 | 2.76 | 2.77 | 2.38 | 0.89 | 0.97 | 0.64 |
| 470 | p1I20 | 2.20 | 0.34 | 0.55 | 0.24 | 1.76 | 1.84 | 1.12 | 0.46 | 0.55 | 0.44 | 0.28 | 0.38 | 0.44 | 1.26 | 2.02 | 1.06 |
| 472 | p1J3 | 0.85 | 0.99 | 3.72 | 2.08 | 0.28 | 0.37 | 0.41 | 2.76 | 3.52 | 1.80 | 1.06 | 1.71 | 1.56 | 2.20 | 2.39 | 1.64 |
| 474 | p1J12 | 4.72 | 0.37 | 0.30 | 0.29 | 0.85 | 0.66 | 1.25 | 2.71 | 1.82 | 1.00 | 0.60 | 1.22 | 0.89 | 0.99 | 1.49 | 0.83 |
| 476 | p1I23 | 3.03 | 0.46 | 0.77 | 0.41 | 12.0 | 15.2 | 26.0 | 0.53 | 0.59 | 0.38 | 0.51 | 0.49 | 0.49 | 1.33 | 1.69 | 1.01 |
| 478 | p1J7 | 0.33 | 0.47 | 0.69 | 0.28 | 0.23 | 0.26 | 0.30 | 2.35 | 1.61 | 1.05 | 1.14 | 1.62 | 1.05 | 3.03 | 2.25 | 1.61 |
| 480 | p1I21 | 0.57 | 0.43 | 0.63 | 0.30 | 0.53 | 0.65 | 0.44 | 0.63 | 0.78 | 0.60 | 1.19 | 1.06 | 1.14 | 1.24 | 1.12 | 1.06 |
| 482 | p1I19 | 0.44 | 2.15 | 1.21 | 1.23 | 0.82 | 1.84 | 1.35 | 0.32 | 0.32 | 0.24 | 7.08 | 5.21 | 1.83 | 0.66 | 0.80 | 0.53 |
| 484 | p1J4 | 0.08 | 0.55 | 0.55 | 0.31 | 0.13 | 0.18 | 0.18 | 6.44 | 2.85 | 3.01 | 5.06 | 4.87 | 1.88 | 1.09 | 1.73 | 0.77 |
| 486 | p1I24 | 1.14 | 0.58 | 0.32 | 0.30 | 0.22 | 0.35 | 0.28 | 0.40 | 0.49 | 0.37 | 8.92 | 9.81 | 2.94 | 1.02 | 1.14 | 0.72 |
| 488 | p1I18 | 0.79 | 0.65 | 0.75 | 0.81 | 1.44 | 2.23 | 1.77 | 0.99 | 1.12 | 0.98 | 0.69 | 1.24 | 1.55 | 2.56 | 2.75 | 1.99 |

[1011] TABLE 13
Response of Novel genes to Hypoxia

| | | | HIGHEST |
|---|---|---|---|
| | | | FOLD CHANGE IN HYPOXIA |
| CLONE ID | GENE NAME | SEQ Ids | (hr hypoxia + cell type) |
| p1F6 | hypothetical protein hqp0376 protein | 337/338 | 67.4 (18 hr monocyte) |
| p1E7 | Novel metallothionein | 83/84 | 37.9 (18 hr monocyte) |
| p1D4 | hypothetical protein FLJ20500 | 25/26 | 23.8 (18 hr monocyte) |
| p1D1 | hypothetical protein FLJ10134 | 23/24 | 14.75 (18 hr neuro) |
| p1H13 | EST | 193/194 | 12.5 DOWN (18 hr mam epithelial) |
| p1F13 | hypothetical protein FLJ13356 fis, clone | 343/344 | 9.26 (18 hr monocyte) |
| | PLACE1000050 | | |
| p1H6 | EST | 191/192 | 8.42 (6 hr cardiomyocyte) |
| p1H17 | EST | 171/172 | 8.33 DOWN (18 hr mam epithelial) |
| p1E14 | unknown mRNA (schizophrenia-linked) | 97/98 | 7.79 (6 hr mam epithelial) |
| p1P14 | hypothetical protein KIAA1745 | 91/92 | 7.32 (18 hr renal epithelial) |
| p1H19 | EST | 195/196 | 7.14 DOWN (18 hr cardiomyocyte) |
| p1D11 | EST | 135/136 | 6.90 (6 hr mam epithelial) |
| p1D17 | hypothetical protein KIAA1745 | 91/92 | 6.74 (6 hr cardiomyocyte) |
| p1F9 | hypothetical protein KIAA0742 | 19/20 | 6.64 (18 hr monocyte) |
| p1D2 | hypothetical protein FLJ10134 | 23/24 | 6.62 (18 hr neuro) |
| p1H21 | hypothetical protein FLJ13511 | 163/164 | 6.61 (18 hr monocyte) |
| p1D16 | cDNA FLJ20308 fis, clone HEP07264 | 33/34 | 6.29 (18 hr neuroblastoma) |
| p1D12 | hypothetical protein KIAA1376 | 29/30 | 5.98 (6 hr cardiomyocyte) |
| p1H3 | EST | 215/216 | 5.88 DOWN (18 hr mam epithelial) |
| p1H10 | EST | 189/190 | 4.98 (6 hr cardiomyocyte) |
| p1D18 | cDNA FLJ13443 fis, clone PLACE1002853 | 127/128 | 4.84 (6 hr cardiomyocyte) |
| p1H4 | EST | 213/214 | 4.76 DOWN (18 hr mam epithelial) |
| p1I4 | hypothetical protein HSPC196 | 53/54 | 4.54 DOWN (18 he mam epithelial) |
| p1G20 | cDNA YO23H03 | 203/204 | 4.17 DOWN (18 hr cardiomyocyte) |
| p1I15 | hypothetical protein CGI-117 | 47/48 | 4.17 DOWN (18 hr adipocyte) |
| p1F8 | hypothetical protein KIAA0914 | Oct. 9 | 3.88 (6 hr mam epithelial) |
| p1H20 | EST | 179/180 | 3.84 DOWN (18 hr cardiomyocyte) |
| p1I22 | hypothetical protein KIAA1429 | 37/38 | 3.70 DOWN (18 hr mam epithelial) |
| p1E16 | cDNA DKFZp586E1624 | 65/66 | 3.56 (6 hr endothelial) |
| p1H15 | EST | 177/178 | 3.45 DOWN (18 hr mam epithelial) |
| p1F5 | hypothetical protein FLJ20281 | Dec. 11 | 3.36 (6 hr mam epithelial) |
| p1E1 | EST | 123/124 | 3.24 (6 hr cardiomyocyte) |
| p1H7 | EST | 175/176 | 3.13 DOWN (18 hr mam epithelial) |
| p1D19 | EST | 143/144 | 2.98 (6 hr cardiomyocyte) |
| p1F21 | cDNA FLJ14342 fis, clone THYRO1000569 | 17/18 | 2.92 (18 hr monocyte) |
| p1H12 | EST | 173/174 | 2.84 (6 hr hepatocyte) |
| p1F2 | hypothetical protein FLJ20037 | Apr. 3 | 2.84 (18 hr monocyte) |
| p1H23 | cDNA FLJ21094 fis, clone CAS03807 | 187/188 | 2.78 DOWN (18 hr neuroblastoma) |
| p1I13 | hypothetical protein FLJ11100 | 43/44 | 2.78 DOWN (18 hr adipocyte) |
| p1D20 | hypothetical protein KIAA1125 | 139/140 | 2.73 (6 hr renal epithelial) |
| p1E11 | EST | 109/110 | 2.73 (6 hr hepatocyte) |
| p1D9 | hypothetical protein DKFZP564D116 | 27/28 | 2.71 (6 hr adipocyte) |
| p1H5 | hypothetical protein FLJ22690 | 205/206 | 2.55 (6 hr cardiomyocyte) |
| p1D24 | EST | 117/118 | 2.55 (18 hr renal epithelial) |
| p1E12 | hypothetical protein DKFZP434E1723 | 69/70 | 2.49 (6 hr mam epithelial) |
| p1F10 | hypothetical protein DKFZp434P0116 | Jun. 5 | 2.45 (6 hr mam epithelial) |
| p1G22 | EST | 197/198 | 2.38 DOWN (18 hr mam epithelial) |
| p1E4 | EST | 125/126 | 2.31 (18 hr monocyte) |
| p1I3 | hypothetical protein FLJ11656 | 153/154 | 2.27 DOWN (18 hr adipocyte) |
| p1F12 | EST | Feb. 1 | 2.27 (6 hr hepatocyte) |
| p1G18 | Mitochondrion sequence | 211/212 | 2.17 (18 hr neuroblastoma) |
| p1E23 | cDNA FLJ14041 fis, clone HEMBA1005780 | 111/112 | 2.16 (18 hr monocyte) |
| p1E9 | novel PI-3-kinase adapter | 79/80 | 2.15 (18 hr monocyte) |
| p1G7 | EST | 281/282 | 2.14 (18 hr monocyte) |
| p1J13 | hypothetical nuclear factor SBBI22 | 35/36 | 2.13 DOWN (18 hr adipocyte) |
| p1E19 | EST | 105/106 | 2.13 (6 hr hepatocyte) |
| p1E15 | cDNA YI27F12 | 107/108 | 2.12 (18 hr monocyte) |
| p1F23 | hypothetical protein LOC51014 | 289/290 | 2.10 (6 hr endothelial) |
| p2A14 | EST | 445/446 | 2.08 DOWN (18 hr mam epithelial) |
| p1I17 | hypothetical protein FLJ20644 | 45/46 | 2.08 (6 hr endothelial) |
| p1E8 | cDNA: FLJ22249 fis, clone HRC02674 | 61/62 | 2.07 (6 hr endothelial) |
| p1H1 | hypothetical protein FLJ10826 | 201/202 | 2.07 (18 hr endothelial) |
| p1I10 | EST | 155/156 | 2.04 DOWN (18 hr mam epithelial) |
| p1I5 | hypothetical protein FLJ10815 | 41/42 | 2.04 (6 hr cardiomyocyte) |
| p1E20 | hypothetical protein FLJ20421 | 99/100 | 2.01 (6 hr renal epithelial) |
| p1C23 | cDNA FLJ12832 fis, clone NT2RP2003137 | 133/134 | 2.01 (6 hr monocyte) |
| p1J16 | cDNA: FLJ23019 fis, clone LNG00916 | 453/454 | 2.00 (6 hr cardiomyocyte) |
| p1I12 | hypothetical protein MGC4549 | 151/152 | 1.96 DOWN (18 hr mam epithelial) |
| p1F1 | EST | 81/82 | 1.96 (18 hr monocyte) |
| p1E22 | cDNA FLJ13618 fis, clone PLACE1010925 | 161/162 | 1.95 (6 hr monocyte) |
| p1D21 | hypothetical protein FLJ22622 | 129/130 | 1.95 (6 hr cardiomyocyte) |
| p1F19 | hypothetical protein KIAA0212 | Aug. 7 | 1.95 (18 hr monocyte) |
| p1F18 | hypothetical protein KIAA0876 | 13/14 | 1.92 DOWN (6 hr adipocyte) |
| p1H9 | EST | 185/186 | 1.91 (18 hr monocyte) |
| p1F11 | hypothetical protein LOC51754 | 323/324 | 1.90 (6 hr macrophage) |
| p1I2 | cDNA FLJ11302 fis, clone PLACE1009971 | 149/150 | 1.88 (18 hr monocyte) |
| p1G21 | EST | 199/200 | 1.85 DOWN (6 hr macrophage) |
| p2A24 | EST | 101/102 | 1.85 DOWN (18 hr adipocyte) |
| p1E13 | hypothetical protein PRO0823 | 21/22 | 1.85 DOWN (18 hr adipocyte) |
| p1E10 | cDNA FLJ11041 fis, clone PLACE1004405 | 71/72 | 1.84 (6 hr endothelial) |
| p1I14 | cDNA DKFZp564D016 | 147/148 | 1.80 (6 hr monocyte) |
| p1J6 | hypothetical protein FLJ10206 | 39/40 | 1.78 (6 hr mam epihelial) |
| p1F3 | hypothetical protein LOC94951 | 333/334 | 1.75 (6 hr renal epithelial) |
| p1I16 | hypothetical protein KIAA1668 | 57/58 | 1.69 (6 hr mam epithelial) |
| p1H16 | EST | 183/184 | 1.64 (18 hr renal epithelial) |
| p1E17 | cDNA FLJ31668 fis, clone NT2RI2004916 | 103/104 | 1.63 (6 hr cardiomyocyte) |
| p1I8 | hypothetical protein FLJ11296 | 55/56 | 1.61 (18 hr macrophage) |
| p1H14 | EST | 167/168 | 1.45 (6 hr renal epithelial) |

[1012] TABLE 14
Response of Novel genes to Hypoxia

| | | | HIGHEST |
|---|---|---|---|
| | | | FOLD CHANGE IN HYPOXIA |
| CLONE ID | GENE NAME | SEQ Ids | (hr hypoxia + cell type) |
| p1D6 | ERO1 (S. cerevisiae)-like | 67/68 | 11.30 (18 hr fibroblast) |
| p1D10 | Insulin induced protein 2 | 75/76 | 8.14 (18 hr renal epithelial) |
| p1H2 | Fatty acid binding protein 5 | 209/210 | 7.14 DOWN (18 hr neuroblastoma) |
| p1H18 | Ubiquitin specific protease 7 | 157/158 | 7.14 DOWN (18 hr mam epithelial) |
| p1D22 | MAX-interacting protein 1 | 119/120 | 6.68 (18 hr renal epithelial) |
| p1C24 | SLC25A19 | 93/94 | 6.13 (18 hr macrophage) |
| p1E3 | CYP1B1 | 137/138 | 5.88 DOWN (18 hr renal epithelial) |
| p1G19 | Mitochondrion sequence | 207/208 | 5.88 DOWN (18 hr mam epithelial) |
| p1D14 | C1orf12 | 89/90 | 5.68 (6 hr cardiomyocyte) |
| p1H8 | ABL | 181/182 | 4.76 DOWN (18 hr cardiomyocyte) |
| p1E6 | EGL nine (C. elegans) homolog 3 | 85/86 | 4.63 (18 hr mam epithelial) |
| p1D13 | Adenylate kinase 3 | 77/78 | 4.58 (6 hr cardiomyocyte) |
| p1H24 | Nucleolar phosphoprotein Nopp34 | 159/160 | 4.40 (6 hr cardiomyocyte) |
| p1D15 | TRIP-Br2 | 31/32 | 4.09 (18 hr renal epithelial) |
| p1F7 | Spectrin, beta, non-erythrocytic 1 | 15/16 | 2.65 (6 hr endothelial) |
| p1E5 | Hepcidin antimicrobial peptide | 141/142 | 2.59 (6 hr macrophage) |
| p1C22 | CD84-H1 | 131/132 | 2.58 (6 hr cardiomyocyte) |
| p1E2 | Mannosidase, alpha, class 1A, member 1 | 121/122 | 2.56 DOWN (18 hr neuroblastoma) |
| p1C21 | Tubulin, beta, 4 | 73/74 | 2.51 (6 hr cardiomyocyte) |
| p1D3 | Serine carboxypeptidase 1 | 95/96 | 2.49 (18 hr fibroblast) |
| p1H11 | Carboxypeptidase M | 169/170 | 2.18 (18 hr monocyte) |
| p1E18 | Plexin C1 | 63/64 | 2.15 (6 hr hepatocyte) |
| p2B1 | PRAME | 87/88 | 2.13 DOWN (18 hr fibroblast) |
| p1E21 | Glutamate-cysteine ligase, modifier subunit | 113/114 | 2.04 (6 hr hepatocyte) |
| p1I11 | SECIS binding protein 2 | 59/60 | 2.00 DOWN (18 hr endothelial) |
| p1I1 | Ribosomal RNA intergenic spacer | 165/166 | 1.92 DOWN (18 hr neuroblastoma) |
| p1I7 | Uridine 5′ monophosphate hydrolase 1 | 49/50 | 1.77 (18 hr monocyte) |
| p1D23 | PTEN | 115/116 | 1.74 (6 hr renal epithelial) |
| p1D5 | ERO1 (S. cerevisiae)-like | 67/68 | 1.72 (6 hr mam epithelial) |
| p2A15 | Sialyltransferase | 145/146 | 1.61 DOWN (6 hr monocyte) |

[1013] TABLE 15
Genes with increased expression by macrophage activation

| | | | mRNA EXPRESSION | | | | | |
|---|---|---|---|---|---|---|---|---|
| | SEQ ID | | (experimental condition) | | | | | |
| Clone | NO: | Gene Name | #1 | #2 | #3 | #4 | #5 | #6 |
| p1K8 | 407/408 | SCYA4 | 0.82 | 0.40 | 1.15 | 0.38 | 91.4 | 68.4 |
| p1B16 | 251/252 | Interleukin 8 | 0.75 | 1.13 | 0.47 | 0.41 | 42.8 | 28.1 |
| p1B15 | 251/252 | Interleukin 8 | 0.85 | 1.12 | 0.44 | 0.37 | 47.4 | 22.5 |
| p1I21 | 479/480 | SCYA8 | 0.54 | 0.18 | 1.15 | 0.32 | 19.6 | 12.2 |
| p1I20 | 469/470 | SCYA3L | 0.92 | 0.41 | 1.00 | 0.30 | 29.4 | 22.8 |
| p1N17 | 237/238 | COX-2 | 0.90 | 1.00 | 0.84 | 0.84 | 18.9 | 20.3 |
| p1J16 | 453/454 | cDNA: FLJ23019 fis, | 0.92 | 0.66 | 0.91 | 1.15 | 14.4 | 14.9 |
| | | clone LNG00916 | | | | | | |
| p1I7 | 49/50 | Uridine 5′ | 1.13 | 0.57 | 0.99 | 0.52 | 17.6 | 23.7 |
| | | monophosphate | | | | | | |
| | | hydrolase 1 | | | | | | |
| p1B14 | 251/252 | Interleukin 8 | 0.71 | 1.20 | 0.51 | 0.47 | 10.1 | 21.4 |
| p1E10 | 71/72 | cDNA FLJ11041 fis, | 0.66 | 0.74 | 1.15 | 0.81 | 8.30 | 12.1 |
| | | clone PLACE1004405 | | | | | | |
| p2L23 | 397/398 | endothelin 1 | 1.02 | 0.62 | 0.74 | 0.50 | 11.4 | 10.1 |
| p1D19 | 143/144 | EST | 0.63 | 0.52 | 1.00 | 1.16 | 5.46 | 4.73 |
| p1K3 | 431/432 | Pleckstrin | 1.14 | 0.70 | 0.73 | 0.54 | 6.49 | 2.34 |
| p1C9 | 373/374 | RAB-8b protein | 0.95 | 0.81 | 0.77 | 0.94 | 5.11 | 4.53 |
| p1I24 | 485/486 | GRO1 | 0.90 | 0.72 | 0.78 | 1.04 | 4.69 | 2.96 |
| p1G3 | 317/318 | B-cell translocation | 0.70 | 1.00 | 0.57 | 1.14 | 3.51 | 3.79 |
| | | gene 1 | | | | | | |
| p1B1 | 243/244 | Metallothionein 1G | 0.51 | 1.00 | 0.66 | 1.85 | 2.50 | 3.83 |
| p1J11 | 465/466 | Fatty-acid-Coenzyme A | 0.69 | 0.51 | 1.36 | 0.91 | 3.07 | 2.97 |
| | | ligase, long-chain 2 | | | | | | |
| p1F17 | 329/330 | P8 protein (candidate of | 0.26 | 1.78 | 0.16 | 0.88 | 1.16 | 2.59 |
| | | metastasis 1) | | | | | | |
| p1F4 | 339/340 | CYP1 | 0.60 | 1.04 | 0.77 | 1.15 | 2.52 | 4.22 |
| p1D10 | 75/76 | Insulin induced protein | 0.49 | 1.00 | 0.48 | 1.23 | 1.63 | 4.96 |
| | | 2 | | | | | | |
| p1E7 | 83/84 | Novel metallothionein | 0.49 | 1.26 | 0.70 | 1.11 | 1.32 | 2.89 |
| p1D24 | 117/118 | EST | 0.58 | 0.71 | 1.00 | 1.32 | 1.56 | 2.59 |
| p1I19 | 481/482 | GR02 | 0.99 | 1.00 | 0.69 | 0.55 | 2.65 | 2.29 |
| p1E22 | 161/162 | cDNA FLJ13618 fis, | 1.19 | 0.77 | 0.85 | 0.51 | 3.09 | 2.41 |
| | | clone PLACE1010925 | | | | | | |
| p1F6 | 337/338 | hypothetical protein | 0.44 | 1.08 | 0.47 | 1.06 | 1.11 | 2.47 |
| | | hqp0376 | | | | | | |
| p1J7 | 477/478 | Sjogren syndrome | 1.06 | 0.74 | 0.85 | 0.63 | 2.65 | 2.95 |
| | | antigen B | | | | | | |
| p1B19 | 235/236 | plasminogen activator | 0.59 | 1.29 | 0.45 | 1.17 | 1.46 | 3.46 |
| | | inhibitor, type 1 | | | | | | |
| p1F24 | 297/298 | Glia-derived nexin | 0.65 | 0.68 | 0.99 | 1.10 | 1.62 | 1.80 |
| p1P5 | 395/396 | SCYA2 | 0.94 | 0.13 | 3.81 | 0.42 | 2.27 | 1.00 |
| p1A22 | 263/264 | Adenylate kinase 3 | 0.57 | 1.30 | 0.58 | 1.64 | 1.34 | 2.74 |
| p1A23 | 265/266 | Metallothionein 2A | 0.55 | 0.89 | 0.95 | 1.01 | 1.23 | 4.38 |
| p1A24 | 239/240 | Metallothionein 1H | 0.50 | 0.84 | 1.03 | 1.02 | 1.08 | 1.60 |
| p1P3 | 221/222 | PDGFB | 0.47 | 2.06 | 0.31 | 1.99 | 1.00 | 1.49 |
| p1A7 | 345/346 | SLC31A2 | 1.10 | 0.92 | 0.84 | 0.93 | 2.30 | 2.32 |
| p1P14 | 91/92/92a | Semaphorin 4b | 0.47 | 2.52 | 0.95 | 4.04 | 0.96 | 3.88 |

Legend
mRNA expression values in the 6 experimental conditions (#1 no cytokines/normoxia, #2 no cytokines/hypoxia, #3 IL-10/normoxia, #4 IL-10/hypoxia, #5 LPS/IFN/normoxia, #6 LPS/IFN/hypoxia) are shown as values referenced to the median value of that gene throughout all 6 experimental conditions.

[1014] TABLE 16
Genes down-regulated by macrophage activation

| | | | mRNA EXPRESSION | | | | | |
|---|---|---|---|---|---|---|---|---|
| | SEO ID | | (experimental condition) | | | | | |
| Clone | NO: | Gene Name | #1 | #2 | #3 | #4 | #5 | #6 |
| p1H13 | 193/194 | EST | 1.35 | 1.41 | 1.00 | 0.91 | 0.44 | 0.68 |
| p1E4 | 125/126 | EST | 1.22 | 1.13 | 1.09 | 0.96 | 0.40 | 0.40 |
| p1G7 | 281/282 | EST | 1.30 | 1.44 | 1.01 | 1.51 | 0.54 | 0.82 |
| p1E1 | 123/124 | EST | 1.21 | 1.64 | 0.94 | 1.35 | 0.51 | 0.63 |
| p1D18 | 127/128 | cDNA FLJ13443 fis, | 1.61 | 2.60 | 0.57 | 1.33 | 0.26 | 0.24 |
| | | clone PLACE1002853 | | | | | | |
| p1I2 | 149/150 | cDNA FLJ11302 fis, | 2.39 | 1.23 | 1.07 | 0.54 | 0.45 | 0.43 |
| | | clone PLACE1009971 | | | | | | |
| p1G20 | 203/204 | cDNA YO23H03 | 1.45 | 0.73 | 1.60 | 1.12 | 0.57 | 0.44 |
| p1D21 | 129/130 | hypothetical protein | 1.41 | 1.72 | 0.82 | 1.26 | 0.14 | 0.14 |
| | | FLJ22622 | | | | | | |
| p1F8 | 9/10 | hypothetical protein | 1.34 | 4.14 | 0.77 | 2.74 | 0.13 | 0.25 |
| | | KIAA0914 | | | | | | |
| p1D16 | 33/34 | hypothetical protein | 1.31 | 2.36 | 1.00 | 1.59 | 0.29 | 0.67 |
| | | FLJ20308 | | | | | | |
| p1F3 | 333/334 | hypothetical protein | 1.63 | 2.21 | 0.92 | 1.00 | 0.42 | 0.42 |
| | | XP_017131 | | | | | | |
| p1D12 | 29/30 | hypothetical protein | 0.89 | 2.62 | 0.79 | 2.07 | 0.28 | 2.61 |
| | | KIAA1376 | | | | | | |
| p1I4 | 53/54 | hypothetical protein | 1.95 | 1.06 | 1.20 | 0.57 | 0.63 | 0.28 |
| | | HSPC196 | | | | | | |
| p1D9 | 27/28 | hypothetical protein | 1.63 | 0.94 | 1.25 | 0.96 | 0.55 | 0.85 |
| | | DKFZP564D116 | | | | | | |
| p1F9 | 19/20 | hypothetical protein | 0.94 | 3.54 | 0.60 | 1.74 | 0.33 | 1.74 |
| | | KIAA0742 | | | | | | |
| p1F11 | 323/324 | hypothetical protein | 1.67 | 1.91 | 1.00 | 0.86 | 0.60 | 0.59 |
| | | LOC51754 | | | | | | |
| p1I15 | 47/48 | hypothetical protein CGI- | 1.31 | 0.62 | 1.86 | 1.26 | 0.49 | 0.76 |
| | | 117 | | | | | | |
| p1E13 | 21/22 | hypothetical protein | 1.15 | 0.93 | 1.15 | 1.08 | 0.44 | 0.24 |
| | | PRO0823 | | | | | | |
| p1F10 | “5/6” | hypothetical protein | 2.16 | 1.05 | 1.54 | 0.83 | 0.83 | 0.67 |
| | | DKFZp434P0116 | | | | | | |
| p1D1 | 23/24 | hypothetical protein | 0.86 | 1.70 | 0.61 | 2.42 | 0.35 | 1.61 |
| | | FLJ10134 | | | | | | |
| p1I5 | 41/42 | hypothetical protein | 1.49 | 1.00 | 1.30 | 0.83 | 0.43 | 0.37 |
| | | FLJ10815 | | | | | | |
| p1G13 | 293/294 | ABCA1 | 1 | 1.05 | 1.22 | 1.07 | 0.43 | 0.46 |
| p1B9 | 313/314 | adipophilin | 1.01 | 3.74 | 1.32 | 2.08 | 0.02 | 0.2 |
| p1B7 | 313/314 | adipophilin | 1.57 | 3.44 | 0.77 | 1.17 | 0.21 | 0.45 |
| p1B6 | 313/314 | adipophilin | 1.24 | 2.45 | 0.8 | 1.51 | 0.38 | 0.52 |
| p1B8 | 313/314 | adipophilin | 1.11 | 1.87 | 1.01 | 1.04 | 0.55 | 0.59 |
| p1K7 | 411/412 | ATP-binding cassette E1 | 1.34 | 0.74 | 1.58 | 1.05 | 0.62 | 0.48 |
| p1J23 | 447/448 | Calgranulin A | 1.21 | 0.94 | 3.35 | 2.8 | 0.58 | 0.86 |
| p1K18 | 415/416 | Colony-stimulating | 2.01 | 0.84 | 1.7 | 0.88 | 1 | 0.74 |
| | | factor 1 | | | | | | |
| p1C2 | 331/332 | CXCR4 | 1.01 | 3.76 | 0.46 | 1.47 | 0.08 | 1.13 |
| p1C1 | 331/332 | CXCR4 | 1.05 | 3.64 | 0.39 | 1.63 | 0.27 | 0.98 |
| p1G12 | 321/322 | Cyclin G2 | 0.85 | 2.17 | 0.6 | 1.29 | 0.28 | 1.33 |
| p1F16 | 325/326 | CYP1B1 | 1.37 | 0.96 | 1.67 | 0.66 | 0.64 | 0.48 |
| p1C7 | 369/370 | D123 | 1.69 | 1.33 | 1.1 | 0.7 | 0.65 | 0.83 |
| p1G17 | 315/316 | Early development | 0.97 | 2.47 | 1.12 | 2.24 | 0.29 | 0.85 |
| | | regulator 2 | | | | | | |
| p1I23 | 475/476 | Ecotropic viral | 1.39 | 1.25 | 1.11 | 1.72 | 0.18 | 0.22 |
| | | integration site 2A | | | | | | |
| p1A14 | 257/258 | Enolase 1 | 0.99 | 3.22 | 1.19 | 2.46 | 0.13 | 0.37 |
| p1A10 | 273/274 | Enolase 2 | 1.17 | 5.28 | 0.59 | 3.77 | 0.49 | 1.08 |
| p1D6 | 67/68 | ERO1 (S. cerevisiae)-like | 0.84 | 3.02 | 0.97 | 2.87 | 0.32 | 1.58 |
| p1A11 | 253/254 | GAPDH | 1.21 | 2.41 | 0.93 | 1.31 | 0.32 | 0.81 |
| p1A12 | 253/254 | GAPDH | 1.09 | 1.97 | 1 | 1.49 | 0.41 | 0.96 |
| p1K22 | 419/420 | GPR44 | 1.24 | 1.03 | 1.42 | 0.93 | 0.56 | 0.48 |
| p1C18 | 269/270 | Granulin | 1.28 | 1.59 | 0.96 | 1.03 | 0.56 | 0.72 |
| p1C17 | 269/270 | Granulin | 1.58 | 1.6 | 0.62 | 0.41 | 0.76 | 0.94 |
| p1A15 | 249/250 | Hexokinase-2 | 0.89 | 3.88 | 0.68 | 3.11 | 0.38 | 2.02 |
| p1C13 | 381/382 | Jk-recombination signal | 1.11 | 1.18 | 1.43 | 1.98 | 0.32 | 0.73 |
| | | binding protein | | | | | | |
| p1A8 | 223/224 | Lactate dehydrogenase A | 0.7 | 2.25 | 1.4 | 1.44 | 0.26 | 1.32 |
| p1A9 | 223/224 | Lactate dehydrogenase A | 0.77 | 1.85 | 1.15 | 1.68 | 0.32 | 1.19 |
| p1G5 | 279/280 | MAX-interacting protein | 1.24 | 5.5 | 0.9 | 4.48 | 0.34 | 0.97 |
| | | 1 | | | | | | |
| p1D22 | 119/120 | MAX-interacting protein | 1.2 | 3.86 | 0.52 | 3.44 | 0.37 | 0.91 |
| | | 1 | | | | | | |
| p1G18 | 211/212 | Mitochondrion sequence | 1.27 | 1.12 | 1 | 1.31 | 0.57 | 0.77 |
| p1K23 | 403/404 | MYC | 1.37 | 0.77 | 2.39 | 1.09 | 0.54 | 0.35 |
| p1E20 | 99/100 | Myo-inositol | 1.12 | 1.28 | 1.02 | 0.99 | 0.48 | 0.61 |
| | | monophosphatase A3 | | | | | | |
| p1B20 | 267/268 | Osteopontin | 1.13 | 1.58 | 0.99 | 1.52 | 0.1 | 0.4 |
| p1F13 | 343/344 | Papillomavirus regulatory | 0.98 | 5.02 | 0.44 | 6.79 | 0.09 | 2.43 |
| | | factor PRF-1 | | | | | | |
| p1A13 | 255/256 | Phosphoglycerate kinase | 1.04 | 2.45 | 1.23 | 1.83 | 0.2 | 0.9 |
| | | 1 | | | | | | |
| p1G9 | 305/306 | PI-3-kinase, catalytic, | 1.46 | 1.88 | 0.75 | 1.17 | 0.44 | 0.47 |
| | | beta polypeptide | | | | | | |
| p1E18 | 63/64 | Plexin C1 | 1.72 | 1.79 | 1 | 0.85 | 0.69 | 0.35 |
| p1C11 | 377/378 | polyubiquitin | 1.13 | 1.79 | 0.79 | 1.14 | 0.5 | 0.84 |
| p1B3 | 231/232 | Proline 4-hydroxylase, | 0.94 | 1.38 | 1.03 | 1.58 | 0.43 | 0.89 |
| | | alpha polypeptide I | | | | | | |
| p1B4 | 349/350 | Proline 4-hydroxylase, | 0.9 | 1.46 | 1.05 | 1.41 | 0.44 | 1 |
| | | alpha polypeptide II | | | | | | |
| p1B22 | 355/356 | Protease, serine, 11 | 1.3 | 1.1 | 1.26 | 0.92 | 0.64 | 0.7 |
| p1C10 | 375/376 | Regulator of G-protein | 1.42 | 1.68 | 0.94 | 1.55 | 0.47 | 0.95 |
| | | signalling 1 | | | | | | |
| p1D3 | 95/96 | Serine carboxypeptidase | 1.22 | 1.07 | 1.07 | 1.09 | 0.33 | 0.88 |
| | | 1 | | | | | | |
| p1F15 | 341/342 | SHB adaptor protein | 1.04 | 1.61 | 0.94 | 1.72 | 0.43 | 0.54 |
| p1A5 | 311/312 | SLC2A5 | 0.71 | 2.6 | 1.06 | 2.09 | 0.34 | 1.09 |
| p1G4 | 307/308 | SLC5A3 | 1.12 | 1.44 | 0.93 | 1.31 | 0.33 | 0.62 |
| p1A20 | 261/262 | Triosephosphate | 0.97 | 2.06 | 1.09 | 2.24 | 0.17 | 0.66 |
| | | isomerase 1 | | | | | | |
| p1D15 | 31/32 | TRIP-Br2 | 1.16 | 1.4 | 1.1 | 1.25 | 0.47 | 0.46 |
| p1K4 | 443/444 | TSC-22 | 1.44 | 1 | 1.55 | 0.7 | 0.6 | 0.57 |

[1015] TABLE 17
Genes responsive to IL-10 (increased or decreased)
but not affected significantly by LPS + IFN

| | | | mRNA EXPRESSION | | | | | |
|---|---|---|---|---|---|---|---|---|
| | SEQ ID | | (experimental condition) | | | | | |
| Clone | NO: | Gene Name | #1 | #2 | #3 | #4 | #5 | #6 |
| p1H8 | 181/182 | ABL | 1.02 | 0.96 | 6.65 | 5.25 | 0.86 | 0.73 |
| p1E15 | 107/108 | cDNA YI27F12 | 0.48 | 0.77 | 1.69 | 2.45 | 0.78 | 1.44 |
| p2A14 | 445/446 | EST | 1.06 | 0.74 | 2.78 | 3.09 | 1.06 | 0.82 |
| p1H6 | 191/192 | EST | 1.01 | 0.84 | 2.47 | 2.05 | 0.93 | 0.83 |
| p1E5 | 141/142 | Hepcidin antimicrobial peptide | 0.84 | 0.73 | 1.91 | 1.68 | 0.58 | 2.16 |
| p1I12 | 151/152 | hypothetical protein MGC4549 | 1.07 | 0.67 | 2.34 | 2.53 | 1.11 | 0.74 |
| p1D8 | 271/272 | Hypoxia-inducible protein 2 | 0.65 | 1.00 | 1.51 | 1.89 | 0.71 | 2.05 |
| p1K14 | 421/422 | Keratin 6B | 1.03 | 0.68 | 3.80 | 3.28 | 0.97 | 0.76 |
| p1J22 | 427/428 | Neutral sphingomyelinase (N-SMase) | 0.94 | 0.79 | 5.59 | 3.52 | 0.91 | 1.29 |
| | | activation associated factor | | | | | | |
| p1G15 | 287/288 | Phosphoglucomutase 1 | 0.82 | 1.20 | 1.83 | 1.90 | 0.61 | 1.05 |
| p1A2 | 247/248 | SLC2A3 | 0.37 | 3.31 | 1.00 | 3.32 | 0.49 | 2.63 |
| p1A3 | 247/248 | SLC2A3 | 0.39 | 2.45 | 1.00 | 2.65 | 0.20 | 1.50 |
| p1K2 | 433/434 | CFFM4 | 1.30 | 0.98 | 0.51 | 0.59 | 1.11 | 0.91 |
| p1C4 | 363/364 | FGF receptor activating protein 1 | 1.02 | 0.96 | 0.50 | 0.63 | 1.16 | 1.31 |

[1016] TABLE 18
Genes up-regulated in human tumors. Individual patients are denoted by the letters E,F,G,H and K.

| | | | Ovary | Ovary | Ovary | Ovary | Ovary | Ovary | Breast | Breast | Breast | Breast |
|---|---|---|---|---|---|---|---|---|---|---|---|---|
| | | | nor | tum | nor | tum | nor | tum | nor | tum | nor | tum |
| Clone | Gene Name | Seq ID | E | E | F | F | G | G | H | H | K | K |
| p1H8 | ABL | 182 | 0.73 | 2.21 | 0.72 | 1.48 | 1.15 | 3.15 | 2.41 | 2.01 | 2.61 | 1.00 |
| p1B6 | adipophilin | 314 | 0.44 | 1.57 | 0.51 | 0.37 | 1.30 | 0.99 | 0.58 | 0.78 | 0.82 | 1.06 |
| p1A19 | Aldolase C | 260 | 0.27 | 1.00 | 0.74 | 1.06 | 0.40 | 1.49 | 0.62 | 0.47 | 0.49 | 2.18 |
| p1C2 | CXCR4 | 332 | 0.29 | 0.91 | 1.03 | 1.41 | 2.43 | 2.80 | 2.71 | 0.95 | 1.81 | 0.59 |
| p1K1 | Cyclophilin F | 430 | 0.60 | 0.71 | 1.11 | 0.80 | 0.61 | 1.85 | 0.76 | 0.76 | 0.95 | 1.66 |
| p1E3 | CYP1B1 | 138 | 0.32 | 0.06 | 0.45 | 1.47 | 1.05 | 0.16 | 1.00 | 0.38 | 1.20 | 0.16 |
| p1F16 | CYP1B1 | 326 | 0.60 | 0.17 | 0.67 | 2.30 | 1.65 | 0.24 | 1.00 | 0.55 | 1.82 | 0.24 |
| p1C8 | Dec1 | 372 | 3.93 | 0.66 | 1.85 | 1.10 | 1.37 | 0.56 | 0.94 | 0.53 | 0.87 | 5.55 |
| p1A14 | Enolase 1 | 258 | 0.10 | 0.46 | 1.00 | 1.26 | 0.41 | 1.47 | 0.36 | 0.81 | 0.53 | 0.61 |
| p1A10 | Enolase 2 | 274 | 0.63 | 0.64 | 1.48 | 3.23 | 0.80 | 2.67 | 0.96 | 0.92 | 0.92 | 0.52 |
| p1D6 | ERO1 (S. cerevisiae)- | 68 | 0.30 | 1.61 | 0.73 | 1.32 | 0.77 | 0.31 | 0.66 | 0.42 | 1.10 | 1.02 |
| | like | | | | | | | | | | | |
| p1E19 | EST | 106 | 1.00 | 2.04 | 1.38 | 1.30 | 0.20 | 1.19 | 2.38 | 2.49 | 1.19 | 1.78 |
| p1H15 | EST | 178 | 0.22 | 0.46 | 0.71 | 1.07 | 0.82 | 2.57 | 2.62 | 1.22 | 3.66 | 1.07 |
| p1H16 | EST | 184 | 1.57 | 2.66 | 1.44 | 1.42 | 0.74 | 2.65 | 2.32 | 1.91 | 1.70 | 1.95 |
| p1H17 | EST | 172 | 0.65 | 2.20 | 1.00 | 1.62 | 0.95 | 2.64 | 2.95 | 2.32 | 2.98 | 0.93 |
| p1H20 | EST | 180 | 0.81 | 2.39 | 0.98 | 1.61 | 0.78 | 2.91 | 2.83 | 1.62 | 2.64 | 1.17 |
| p1H3 | EST | 216 | 0.10 | 0.38 | 0.78 | 1.14 | 0.88 | 2.49 | 2.26 | 1.18 | 3.08 | 0.89 |
| p1C4 | FGF receptor | 364 | 0.53 | 0.77 | 0.91 | 1.00 | 1.04 | 0.98 | 0.81 | 1.27 | 0.72 | 2.43 |
| | activating protein 1 | | | | | | | | | | | |
| p1A11 | GAPDH | 254 | 0.04 | 0.74 | 1.50 | 2.84 | 0.86 | 1.57 | 0.27 | 1.12 | 0.51 | 0.69 |
| p1C6 | Glucose phosphate | 368 | 0.21 | 0.86 | 1.59 | 2.26 | 0.65 | 1.94 | 0.47 | 0.79 | 0.61 | 1.00 |
| | isomerase | | | | | | | | | | | |
| p1E21 | Glutamate-cysteine | 114 | 1.26 | 2.38 | 1.35 | 1.23 | 0.27 | 1.51 | 2.05 | 4.12 | 1.00 | 1.78 |
| | ligase, modifier | | | | | | | | | | | |
| | subunit | | | | | | | | | | | |
| p1C18 | Granulin | 270 | 0.44 | 0.91 | 1.00 | 0.83 | 0.71 | 0.88 | 0.60 | 0.61 | 0.73 | 2.72 |
| p1D21 | hypothetical protein | 130 | 0.39 | 8.14 | 0.53 | 0.59 | 0.92 | 0.54 | 0.87 | 1.71 | 0.99 | 1.00 |
| | FLJ22622 | | | | | | | | | | | |
| p1F11 | hypothetical protein | 324 | 0.53 | 0.77 | 1.01 | 0.97 | 0.61 | 1.88 | 1.54 | 1.10 | 0.85 | 0.70 |
| | LOC51754 | | | | | | | | | | | |
| p1A8 | Lactate dehydrogenase | 224 | 0.24 | 1.07 | 1.09 | 1.00 | 0.70 | 0.40 | 0.52 | 0.50 | 0.66 | 0.92 |
| | A | | | | | | | | | | | |
| P1K9 | Lipocortin I | 402 | 0.46 | 4.09 | 1.33 | 1.17 | 1.07 | 0.31 | 1.20 | 0.54 | 0.23 | 0.12 |
| p1B1 | Metallothionein 1G | 244 | 1.21 | 0.60 | 3.14 | 1.49 | 1.00 | 2.04 | 0.46 | 1.54 | 0.27 | 0.51 |
| P1K23 | MYC | 404 | 5.98 | 1.00 | 2.50 | 2.41 | 4.11 | 1.91 | 0.64 | 2.17 | 0.32 | 0.44 |
| p1B20 | Osteopontin | 268 | 0.05 | 1.01 | 2.74 | 1.69 | 0.22 | 0.36 | 0.24 | 0.52 | 0.35 | 0.92 |
| p1B21 | Osteopontin | 268 | 0.22 | 1.73 | 2.09 | 1.87 | 0.58 | 0.76 | 0.52 | 0.65 | 0.44 | 1.00 |
| p1F17 | P8 protein (candidate | 330 | 1.18 | 0.17 | 1.27 | 1.47 | 0.55 | 1.79 | 1.00 | 0.97 | 0.92 | 1.33 |
| | of metastasis 1) | | | | | | | | | | | |
| p1C11 | polyubiquitin | 378 | 1.11 | 0.91 | 1.59 | 1.53 | 1.00 | 1.34 | 0.63 | 0.65 | 0.51 | 2.52 |
| p2B1 | PRAME | 88 | 1.13 | 8.86 | 5.08 | 9.57 | 1.15 | 18.20 | 1.63 | 1.64 | 0.96 | 0.96 |
| p1B5 | Proline 4-hydroxylase, | 350 | 0.50 | 0.52 | 1.02 | 3.18 | 1.94 | 1.31 | 0.79 | 0.89 | 0.72 | 1.62 |
| | alpha polypeptide II | | | | | | | | | | | |
| p1P14 | Semaphorin 4b | 92 | 0.80 | 4.26 | 0.86 | 1.01 | 1.22 | 1.88 | 1.33 | 1.73 | 1.48 | 2.26 |
| p1A6 | SLC2A5 | 312 | 0.52 | 5.07 | 0.89 | 2.12 | 1.48 | 0.68 | 1.21 | 0.55 | 1.37 | 0.87 |
| p1J17 | SLC6A1 | 438 | 0.11 | 0.39 | 0.85 | 1.42 | 0.80 | 3.56 | 3.08 | 1.17 | 4.08 | 1.00 |
| p1J18 | Synaptopodin | 440 | 0.07 | 0.31 | 0.99 | 1.44 | 0.68 | 3.03 | 3.51 | 1.40 | 4.54 | 1.29 |
| p1J15 | TERA protein | 442 | 0.68 | 2.14 | 0.80 | 1.47 | 1.00 | 2.36 | 2.97 | 2.74 | 3.14 | 0.97 |
| p1G11 | Tumor protein D52 | 302 | 0.20 | 1.49 | 0.51 | 1.07 | 0.83 | 1.00 | 1.66 | 1.82 | 1.90 | 2.62 |
| p1H18 | Ubiquitin specific | 158 | 0.73 | 2.13 | 0.91 | 1.76 | 0.82 | 2.47 | 2.56 | 2.04 | 2.53 | 1.00 |
| | protease 7 | | | | | | | | | | | |
| p1O20 | VEGF | 228 | 0.84 | 4.19 | 0.85 | 1.55 | 2.31 | 12.69 | 0.66 | 1.42 | 1.35 | 6.44 |

[1017] TABLE 19
Genes down-regulated in human tumors. Individual patients are denoted by the letters E,F,G,H and K.

| | | | Ovary | Ovary | Ovary | Ovary | Ovary | Ovary | Breast | Breast | Breast | Breast |
|---|---|---|---|---|---|---|---|---|---|---|---|---|
| | | Seq | nor | tum | nor | tum | nor | tum | nor | tum | nor | tum |
| Clone | Gene Name | ID | E | E | F | F | G | G | H | H | K | K |
| p1C3 | Activin A receptor, type I | 362 | 1.51 | 0.32 | 1.28 | 1.76 | 1.06 | 1.21 | 0.99 | 0.87 | 0.76 | 1.17 |
| p1B9 | adipophilin | 314 | 0.67 | 0.20 | 0.78 | 0.50 | 1.53 | 2.45 | 0.61 | 0.83 | 0.68 | 0.85 |
| p1K15 | Alpha-2-macroglobulin | 406 | 0.39 | 0.12 | 0.79 | 0.54 | 1.08 | 0.38 | 0.71 | 1.16 | 0.53 | 0.71 |
| p1G3 | B-cell translocation gene 1 | 318 | 2.01 | 0.64 | 1.15 | 1.13 | 1.69 | 0.58 | 1.39 | 1.13 | 1.66 | 0.78 |
| p1F14 | Butyrate response factor 1 | 328 | 2.85 | 0.94 | 1.86 | 2.31 | 1.46 | 0.79 | 1.36 | 1.00 | 0.86 | 1.09 |
| p1J23 | Calgranulin A | 448 | 0.43 | 0.90 | 1.00 | 0.91 | 11.60 | 0.59 | 12.02 | 1.60 | 23.70 | 0.80 |
| p1K2 | CFFM4 | 434 | 0.47 | 0.29 | 1.30 | 1.06 | 2.32 | 0.31 | 1.00 | 0.49 | 0.79 | 1.52 |
| p1J19 | CFFM4 | 434 | 0.45 | 0.29 | 1.24 | 1.00 | 2.06 | 0.35 | 1.42 | 0.56 | 0.76 | 1.44 |
| p2A23 | Chitinase 3-like 2 | 284 | 0.66 | 0.78 | 0.48 | 0.61 | 4.18 | 0.74 | 1.36 | 2.22 | 0.91 | 2.01 |
| p1N17 | COX-2 | 238 | 0.73 | 1.21 | 0.51 | 0.72 | 2.31 | 0.57 | 0.80 | 0.61 | 0.56 | 0.54 |
| p1C2 | CXCR4 | 332 | 0.29 | 0.91 | 1.03 | 1.41 | 2.43 | 2.80 | 2.71 | 0.95 | 1.81 | 0.59 |
| p1E3 | CYP1B1 | 138 | 0.32 | 0.06 | 0.45 | 1.47 | 1.05 | 0.16 | 1.00 | 0.38 | 1.20 | 0.16 |
| p1F16 | CYP1B1 | 326 | 0.60 | 0.17 | 0.67 | 2.30 | 1.65 | 0.24 | 1.00 | 0.55 | 1.82 | 0.24 |
| p1C8 | Dec1 | 372 | 3.93 | 0.66 | 1.85 | 1.10 | 1.37 | 0.56 | 0.94 | 0.53 | 0.87 | 5.55 |
| p1J10 | DNCLI2 | 460 | 1.00 | 0.98 | 1.28 | 1.17 | 1.66 | 0.50 | 2.02 | 1.51 | 0.98 | 0.90 |
| p1I23 | Ecotropic viral integration | 476 | 0.64 | 0.67 | 0.88 | 1.08 | 1.28 | 0.39 | 0.79 | 0.71 | 1.06 | 0.78 |
| | site 2A | | | | | | | | | | | |
| p1E4 | EST | 126 | 1.30 | 1.67 | 0.88 | 0.65 | 0.70 | 0.17 | 1.00 | 0.69 | 1.06 | 0.46 |
| p1H19 | EST | 196 | 0.71 | 1.52 | 0.80 | 0.99 | 1.08 | 1.17 | 1.99 | 1.70 | 3.34 | 0.83 |
| p1H4 | EST | 214 | 0.32 | 0.76 | 0.70 | 1.02 | 1.14 | 2.36 | 2.34 | 1.65 | 2.90 | 0.75 |
| p1H3 | EST | 216 | 0.10 | 0.38 | 0.78 | 1.14 | 0.88 | 2.49 | 2.26 | 1.18 | 3.08 | 0.89 |
| p1H15 | EST | 178 | 0.22 | 0.46 | 0.71 | 1.07 | 0.82 | 2.57 | 2.62 | 1.22 | 3.66 | 1.07 |
| p1H17 | EST | 172 | 0.65 | 2.20 | 1.00 | 1.62 | 0.95 | 2.64 | 2.95 | 2.32 | 2.98 | 0.93 |
| p1J11 | Fatty-acid-Coenzyme A | 466 | 0.83 | 0.23 | 0.68 | 1.38 | 1.05 | 0.44 | 1.42 | 0.85 | 1.00 | 1.00 |
| | ligase, long-chain 2 | | | | | | | | | | | |
| p1F24 | Glia-derived nexin | 298 | 3.17 | 0.93 | 3.24 | 0.85 | 1.26 | 0.80 | 1.64 | 1.89 | 1.25 | 0.96 |
| p1I24 | GRO1 | 486 | 0.82 | 2.23 | 1.55 | 3.98 | 3.19 | 0.52 | 0.50 | 0.55 | 0.31 | 0.52 |
| p1I19 | GRO2 | 482 | 1.97 | 2.36 | 3.67 | 4.14 | 11.31 | 1.00 | 1.29 | 1.48 | 0.64 | 0.70 |
| p1D1 | hypothetical protein | 24 | 1.20 | 0.40 | 1.82 | 1.82 | 0.73 | 0.68 | 0.81 | 1.03 | 1.28 | 0.96 |
| | FLJ10134 | | | | | | | | | | | |
| p1H21 | hypothetical protein | 164 | 1.00 | 0.22 | 0.97 | 0.49 | 1.73 | 0.72 | 1.35 | 0.75 | 2.85 | 1.76 |
| | FLJ13511 | | | | | | | | | | | |
| p1F2 | hypothetical protein | 4 | 2.41 | 0.61 | 1.20 | 0.63 | 1.40 | 0.39 | 0.66 | 0.73 | 0.53 | 0.63 |
| | FLJ20037 | | | | | | | | | | | |
| p1F23 | hypothetical protein | 290 | 1.27 | 0.85 | 0.90 | 1.03 | 1.82 | 0.55 | 0.90 | 0.92 | 0.84 | 0.94 |
| | LOC51014 | | | | | | | | | | | |
| p1E13 | hypothetical protein | 22 | 0.51 | 0.60 | 1.00 | 0.98 | 1.74 | 0.52 | 2.15 | 0.98 | 2.26 | 0.85 |
| | PRO0823 | | | | | | | | | | | |
| p1F3 | hypothetical protein | 334 | 2.75 | 0.91 | 1.26 | 1.39 | 1.42 | 0.61 | 1.67 | 1.96 | 1.13 | 1.02 |
| | XP_017131 | | | | | | | | | | | |
| p1B14 | Interleukin 8 | 252 | 2.96 | 0.36 | 4.71 | 1.04 | 8.45 | 1.00 | 0.36 | 0.37 | 0.54 | 0.37 |
| p1B16 | Interleukin 8 | 252 | 3.16 | 0.50 | 7.46 | 1.82 | 16.49 | 3.29 | 1.00 | 0.42 | 0.66 | 0.36 |
| p1B15 | Interleukin 8 | 252 | 3.43 | 0.54 | 7.25 | 1.69 | 11.81 | 3.46 | 0.94 | 0.75 | 0.67 | 0.88 |
| p1C13 | Jk-recombination signal | 382 | 1.94 | 0.55 | 1.48 | 1.17 | 0.54 | 0.50 | 0.54 | 0.80 | 0.51 | 0.57 |
| | binding protein | | | | | | | | | | | |
| p1K9 | Lipocortin I | 402 | 0.46 | 4.09 | 1.33 | 1.17 | 1.07 | 0.31 | 1.20 | 0.54 | 0.23 | 0.12 |
| p1E2 | Mannosidase, alpha, class | 122 | 0.87 | 0.40 | 1.00 | 0.88 | 2.02 | 0.50 | 1.51 | 0.67 | 1.54 | 1.63 |
| | 1A, member 1 | | | | | | | | | | | |
| p1A23 | Metallothionein 2A | 266 | 0.78 | 0.22 | 2.96 | 1.22 | 2.34 | 1.05 | 0.58 | 1.50 | 0.40 | 0.48 |
| p1G19 | Mitochondrion sequence | 208 | 1.00 | 1.74 | 1.17 | 1.08 | 0.99 | 1.69 | 2.16 | 1.67 | 2.10 | 0.58 |
| p1G18 | Mitochondrion sequence | 212 | 0.77 | 1.43 | 0.95 | 1.02 | 1.00 | 0.99 | 1.71 | 1.62 | 2.61 | 0.86 |
| p1K23 | MYC | 404 | 5.98 | 1.00 | 2.50 | 2.41 | 4.11 | 1.91 | 0.64 | 2.17 | 0.32 | 0.44 |
| p1J20 | Neuro-oncological ventral | 426 | 0.54 | 1.61 | 1.00 | 1.50 | 1.24 | 2.65 | 3.08 | 2.55 | 2.77 | 0.83 |
| | antigen 1 | | | | | | | | | | | |
| p1F17 | P8 protein (candidate of | 330 | 1.18 | 0.17 | 1.27 | 1.47 | 0.55 | 1.79 | 1.00 | 0.97 | 0.92 | 1.33 |
| | metastasis 1) | | | | | | | | | | | |
| p1B19 | plasminogen activator | 236 | 3.22 | 0.44 | 2.15 | 1.84 | 7.67 | 2.48 | 0.97 | 0.56 | 0.88 | 0.86 |
| | inhibitor, type 1 | | | | | | | | | | | |
| p1B18 | plasminogen activator | 236 | 1.53 | 0.34 | 1.27 | 1.28 | 2.90 | 1.44 | 0.52 | 0.84 | 0.79 | 0.75 |
| | inhibitor, type 1 | | | | | | | | | | | |
| p1K3 | Pleckstrin | 432 | 0.39 | 0.45 | 0.99 | 0.92 | 1.78 | 0.43 | 1.39 | 0.41 | 1.66 | 1.00 |
| p1B3 | Proline 4-hydroxylase, | 232 | 1.12 | 1.00 | 1.44 | 1.83 | 0.71 | 0.74 | 0.78 | 0.25 | 1.22 | 0.50 |
| | alpha polypeptide I | | | | | | | | | | | |
| p1F20 | Proline-rich protein with | 336 | 4.29 | 0.54 | 2.08 | 1.23 | 2.34 | 1.08 | 0.89 | 1.00 | 1.13 | 0.61 |
| | nuclear targeting signal | | | | | | | | | | | |
| p1B22 | Protease, serine, 11 | 356 | 3.86 | 0.86 | 9.76 | 2.40 | 1.17 | 0.95 | 1.18 | 0.88 | 0.79 | 1.00 |
| p1C10 | Regulator of G-protein | 376 | 0.26 | 0.12 | 1.09 | 1.10 | 1.93 | 0.14 | 0.42 | 0.12 | 0.44 | 1.00 |
| | signalling 1 | | | | | | | | | | | |
| p1P5 | SCYA2 | 396 | 2.43 | 0.63 | 3.14 | 1.39 | 2.20 | 0.61 | 1.14 | 0.98 | 0.82 | 0.89 |
| p1K8 | SCYA4 | 408 | 1.00 | 0.56 | 2.48 | 2.29 | 1.94 | 0.54 | 1.94 | 0.68 | 1.75 | 1.62 |
| p1I11 | SECIS binding protein 2 | 60 | 1.49 | 0.90 | 1.00 | 0.98 | 1.09 | 0.36 | 2.31 | 2.24 | 2.10 | 1.49 |
| p1I18 | Selectin L | 488 | 0.60 | 0.78 | 1.00 | 1.46 | 4.25 | 1.46 | 5.73 | 1.09 | 4.30 | 2.26 |
| p1D3 | Serine carboxypeptidase 1 | 96 | 0.76 | 0.09 | 0.91 | 0.98 | 0.76 | 0.50 | 0.98 | 1.00 | 1.13 | 0.95 |
| p1J17 | SLC6A1 | 438 | 0.11 | 0.39 | 0.85 | 1.42 | 0.80 | 3.56 | 3.08 | 1.17 | 4.08 | 1.00 |
| p1F7 | Spectrin, beta, non- | 16 | 2.52 | 0.48 | 2.04 | 1.14 | 1.65 | 0.95 | 2.30 | 1.90 | 0.91 | 0.91 |
| | erythrocytic 1 | | | | | | | | | | | |
| p1J18 | Synaptopodin | 440 | 0.07 | 0.31 | 0.99 | 1.44 | 0.68 | 3.03 | 3.51 | 1.40 | 4.54 | 1.29 |
| p1J15 | TERA protein | 442 | 0.68 | 2.14 | 0.80 | 1.47 | 1.00 | 2.36 | 2.97 | 2.74 | 3.14 | 0.97 |
| p1K4 | TSC-22 | 444 | 2.92 | 0.46 | 1.40 | 2.19 | 0.85 | 1.05 | 0.56 | 1.12 | 0.35 | 0.88 |

[1018] TABLE 20
Genes up-regulated in response to TNFα

| | | | Cytokine/% Oxygen | | | |
|---|---|---|---|---|---|---|
| | | Seq | none | none | TNF | TNF |
| Clone | Gene Name | ID | 20 | 0.1 | 20 | 0.1 |
| p1C14 | Abstrakt | 384 | 1 | 7.89 | 4.63 | 7.87 |
| p1D13 | Adenylate kinase 3 | 78 | 1 | 0.85 | 2.36 | 2.47 |
| p1A22 | Adenylate kinase 3 | 264 | 1 | 1.53 | 2.69 | 3.72 |
| p1B8 | adipophilin | 314 | 1 | 17.1 | 2.27 | 8.81 |
| p1B7 | adipophilin | 314 | 1 | 13.4 | 2.17 | 5.86 |
| p1A19 | Aldolase C | 260 | 1 | 6.61 | 2.57 | 6.31 |
| p1N17 | COX-2 | 238 | 1 | 1.04 | 0.91 | 2.24 |
| p1C1 | CXCR4 | 332 | 1 | 5.42 | 2.21 | 5.22 |
| p1F4 | CYP1 | 340 | 1 | 2.86 | 3.43 | 6.26 |
| p1E3 | CYP1B1 | 138 | 1 | 0.33 | 2.12 | 1.14 |
| p1F16 | CYP1B1 | 326 | 1 | 0.45 | 1.93 | 1.19 |
| p2L23 | endothelin 1 | 398 | 1 | 0.95 | 2.74 | 2.41 |
| p1A14 | Enolase 1 | 258 | 1 | 9.98 | 7.22 | 11.78 |
| p1A11 | GAPDH | 254 | 1 | 7.87 | 3.60 | 5.90 |
| p1C6 | Glucose phosphate | 368 | 1 | 5.18 | 2.58 | 3.61 |
| | isomerase | | | | | |
| p1D9 | hypothetical protein | 28 | 1 | 2.37 | 2.48 | 3.16 |
| | DKFZP564D116 | | | | | |
| p1F5 | hypothetical protein | 12 | 1 | 3.84 | 2.05 | 3.78 |
| | FLJ20281 | | | | | |
| p1B23 | Interleukin 1 receptor | 358 | 1 | 3.46 | 3.43 | 5.35 |
| | antagonist | | | | | |
| p1B14 | Interleukin 8 | 252 | 1 | 5.52 | 16.8 | 56.8 |
| p1B16 | Interleukin 8 | 252 | 1 | 2.55 | 9.64 | 23.3 |
| p1B15 | Interleukin 8 | 252 | 1 | 3.37 | 10.4 | 28.1 |
| p1C13 | Jk-recombination signal | 382 | 1 | 5.82 | 4.77 | 8.75 |
| | binding protein | | | | | |
| p1A8 | Lactate dehydrogenase A | 224 | 1 | 24.8 | 4.08 | 15.1 |
| p1A13 | Phosphoglycerate kinase 1 | 256 | 1 | 7.29 | 2.73 | 4.65 |
| p1B19 | Plasminogen activator | 236 | 1 | 3.78 | 2.63 | 9.41 |
| | inhibitor, type 1 | | | | | |
| p1B18 | Plasminogen activator | 236 | 1 | 4.92 | 2.23 | 6.55 |
| | inhibitor, type 1 | | | | | |
| p1C11 | Polyubiquitin | 378 | 1 | 2.80 | 2.06 | 3.03 |
| p1B4 | Proline 4-hydroxylase, | 350 | 1 | 6.15 | 3.09 | 5.80 |
| | alpha polypeptide II | | | | | |
| p1F20 | Proline-rich protein with | 336 | 1 | 4.69 | 2.18 | 6.45 |
| | nuclear targeting signal | | | | | |
| p1I20 | SCYA3L | 470 | 1 | 0.77 | 3.97 | 3.61 |
| p1K8 | SCYA4 | 408 | 1 | 0.81 | 9.65 | 9.63 |
| p1D3 | Serine carboxypeptidase 1 | 96 | 1 | 3.74 | 2.37 | 3.55 |
| p1A2 | SLC2A3 | 248 | 1 | 16.0 | 2.68 | 15.5 |
| p1F22 | Sorting nexin 9 | 320 | 1 | 0.66 | 1.26 | 1.63 |
| p1B10 | Stearoyl-CoA desaturase | 352 | 1 | 5.04 | 3.05 | 6.95 |
| p1B17 | Tissue factor | 226 | 1 | 3.69 | 2.74 | 6.03 |
| p1A20 | Triosephosphate isomerase | 262 | 1 | 16.1 | 8.30 | 16.2 |
| | 1 | | | | | |
| p1E14 | unknown mRNA | 98 | 1 | 3.30 | 3.03 | 3.26 |
| | (schizophrenia-linked) | | | | | |

[1019] TABLE 21
Genes down-regulated in response to TNFα

| | | | Cytokine/% Oxygen | | | |
|---|---|---|---|---|---|---|
| | | | none | none | TNF | TNF |
| Clone | Gene Name | Seq ID | 20 | 0.1 | 20 | 0.1 |
| p1E5 | Hepcidin antimicrobial | 142 | 1 | 1.50 | 0.19 | 0.70 |
| | peptide | | | | | |
| p1H2 | Fatty acid binding protein 5 | 210 | 1 | 0.72 | 0.38 | 0.46 |
| p1P5 | SCYA2 | 396 | 1 | 0.29 | 0.45 | 0.26 |
| p1J5 | SCYA7 | 464 | 1 | 0.89 | 0.46 | 0.49 |

[1020] TABLE 22
Genes up-regulated in response to IL-17

| | | | Cytokine/% Oxygen | | | |
|---|---|---|---|---|---|---|
| | | | none | none | IL-17 | IL-17 |
| Clone | Gene Name | Seq ID | 20 | 0.1 | 20 | 0.1 |
| p1J11 | Fatty-acid-Coenzyme A | 466 | 1 | 0.55 | 1.63 | 1.28 |
| | ligase, long-chain 2 | | | | | |
| p1A11 | GAPDH | 254 | 1 | 0.78 | 2.60 | 1.84 |
| p1C6 | Glucose phosphate | 368 | 1 | 0.84 | 2.14 | 1.43 |
| | isomerase | | | | | |
| p1I24 | GRO1 | 486 | 1 | 1.02 | 2.29 | 1.28 |
| p1I19 | GRO2 | 482 | 1 | 1.02 | 2.26 | 1.43 |
| p1B16 | Interleukin 8 | 252 | 1 | 1.77 | 9.52 | 12.2 |
| p1B15 | Interleukin 8 | 252 | 1 | 1.54 | 7.36 | 9.71 |
| p1B14 | Interleukin 8 | 252 | 1 | 1.50 | 9.34 | 7.13 |
| p1P5 | SCYA2 | 396 | 1 | 0.24 | 2.12 | 0.58 |
| p1K8 | SCYA4 | 408 | 1 | 0.44 | 2.48 | 0.83 |

[1021] TABLE 23
Genes down-regulated in response to IL-17

| | | | Cytokine/% Oxygen | | | |
|---|---|---|---|---|---|---|
| | | Seq | none | none | IL-17 | IL-17 |
| Clone | Gene Name | ID | 20 | 0.1 | 20 | 0.1 |
| p1H8 | ABL | 182 | 1 | 1.08 | 0.08 | 0.09 |
| p1J22 | Neutral | 428 | 1 | 1.21 | 0.13 | 0.11 |
| | sphingomyelinase | | | | | |
| | (N-SMase) activation | | | | | |
| | associated factor | | | | | |
| p1K14 | Keratin 6B | 422 | 1 | 1.27 | 0.15 | 0.15 |
| p1J6 | hypothetical protein | 40 | 1 | 1.28 | 0.22 | 0.23 |
| | FLJ10206 | | | | | |
| p1I12 | hypothetical protein | 152 | 1 | 1.20 | 0.32 | 0.30 |
| | MGC4549 | | | | | |
| p1E15 | cDNA YI27F12 | 108 | 1 | 1.58 | 0.21 | 0.56 |
| p2A14 | EST | 446 | 1 | 1.10 | 0.56 | 0.40 |
| p1G24 | Glycogen synthase 1 | 276 | 1 | 1.45 | 0.34 | 0.65 |
| p1C16 | Decidual protein | 388 | 1 | 1.09 | 0.73 | 0.51 |
| | induced by progesterone | | | | | |
| p1D8 | Hypoxia-inducible | 272 | 1 | 1.30 | 0.44 | 0.65 |
| | protein 2 | | | | | |
| p1B18 | Plasminogen activator | 236 | 1 | 1.10 | 0.49 | 0.78 |
| | inhibitor, type 1 | | | | | |
| p1H4 | EST | 214 | 1 | 1.13 | 0.49 | 0.58 |

[1022] TABLE 24
Genes up-regulated in response to IL-15

| | | | Cytokine/% Oxygen | | | |
|---|---|---|---|---|---|---|
| | | Seq | none | none | IL-15 | IL-15 |
| Clone | Gene Name | ID | 20 | 0.1 | 20 | 0.1 |
| p1A19 | Aldolase C | 260 | 1 | 0.50 | 0.35 | 1.30 |
| p1J16 | cDNA: FLJ23019 fis, | 454 | 1 | 0.80 | 5.76 | 7.27 |
| | clone LNG00916 | | | | | |
| p1D19 | EST | 144 | 1 | 1.00 | 2.27 | 1.39 |
| p1J11 | Fatty-acid-Coenzyme A | 466 | 1 | 0.55 | 1.64 | 1.29 |
| | ligase, long-chain 2 | | | | | |
| p1A11 | GAPDH | 254 | 1 | 0.78 | 0.52 | 4.32 |
| p1C6 | Glucose phosphate | 368 | 1 | 0.84 | 0.57 | 3.13 |
| | isomerase | | | | | |
| p1H5 | hypothetical protein | 206 | 1 | 0.94 | 2.37 | 1.59 |
| | FLJ22690 | | | | | |
| p1A23 | Metallothionein 2A | 266 | 1 | 1.41 | 1.26 | 3.08 |
| p1P5 | SCYA2 | 396 | 1 | 0.24 | 4.51 | 1.37 |
| p1J5 | SCYA7 | 464 | 1 | 0.66 | 3.27 | 1.61 |
| p1I21 | SCYA8 | 480 | 1 | 0.37 | 3.77 | 1.55 |
| p1I7 | Uridine 5′ | 50 | 1 | 0.84 | 4.98 | 3.61 |
| | monophosphate | | | | | |
| | hydrolase 1 | | | | | |

[1023] TABLE 25
Genes down-regulated in response to IL-15

| | | | Cytokine/% Oxygen | | | |
|---|---|---|---|---|---|---|
| | | Seq | none | none | IL-15 | IL-15 |
| Clone | Gene Name | ID | 20 | 0.1 | 20 | 0.1 |
| p1H8 | ABL | 182 | 1 | 1.08 | 1.22 | 0.09 |
| p1C14 | Abstrakt | 384 | 1 | 0.69 | 0.40 | 1.24 |
| p1B8 | Adipophilin | 314 | 1 | 1.08 | 0.23 | 1.42 |
| p1B7 | Adipophilin | 314 | 1 | 1.10 | 0.30 | 2.02 |
| p1B6 | Adipophilin | 314 | 1 | 0.98 | 0.37 | 2.39 |
| p1B9 | Adipophilin | 314 | 1 | 1.46 | 0.41 | 1.66 |
| p1A19 | Aldolase C | 260 | 1 | 0.50 | 0.35 | 1.30 |
| p1C7 | D123 | 370 | 1 | 0.53 | 0.47 | 0.90 |
| p1H6 | EST | 192 | 1 | 1.46 | 1.95 | 0.67 |
| p2A14 | EST | 446 | 1 | 1.10 | 1.08 | 0.51 |
| p1G24 | Glycogen synthase 1 | 276 | 1 | 1.45 | 0.88 | 0.55 |
| p1J6 | hypothetical protein | 40 | 1 | 1.28 | 1.28 | 0.18 |
| | FLJ10206 | | | | | |
| p1I12 | hypothetical protein | 152 | 1 | 1.20 | 1.64 | 0.28 |
| | MGC4549 | | | | | |
| p1D8 | Hypoxia-inducible | 272 | 1 | 1.30 | 1.25 | 0.62 |
| | protein 2 | | | | | |
| p1K14 | Keratin 6B | 422 | 1 | 1.27 | 1.48 | 0.11 |
| p1A8 | Lactate dehydrogenase A | 224 | 1 | 1.31 | 0.48 | 2.29 |
| p1A9 | Lactate dehydrogenase A | 224 | 1 | 1.95 | 0.49 | 1.83 |
| p1J22 | Neutral | 428 | 1 | 1.21 | 1.51 | 0.11 |
| | sphingomyelinase | | | | | |
| | (N-SMase) activation | | | | | |
| | associated factor | | | | | |
| p1B4 | Proline 4-hydroxylase, | 350 | 1 | 0.81 | 0.50 | 1.34 |
| | alpha polypeptide II | | | | | |
| p1A20 | Triosephosphate | 262 | 1 | 0.81 | 0.36 | 1.22 |
| | isomerase 1 | | | | | |

[1024] TABLE 26
cross-references all protein and nucleotide sequences (SEQ ID NOS) that are referenced
herein to accession numbers in public databases available as of 8.12.00.

| | Hypoxia | PROTEIN | | NUCLEOTIDE | |
|---|---|---|---|---|---|
| TITLE | response | SEQ ID | ACCESSION | SEQ ID | ACCESSION |
| cDNA FLJ13611 fis, clone PLACE1010802 | Increase | 1 | BAB14633 | 2 | AK023673 |
| hypothetical protein FLJ20037 | Increase | 3 | BAA90903 | 4 | AK000044 |
| hypothetical protein DKFZp434P0116 | Increase | 5 | CAB70863 | 6 | AL137661 |
| KIAA0212 | Increase | 7 | BAA13203 | 8 | D86967 |
| KIAA0914 | Increase | 9 | BAA74937 | 10 | AB020721 |
| hypothetical protein FLJ20281 | Increase | 11 | NP_060212 | 12 | NM_017742 |
| KIAA0876 | Increase | 13 | BAA74899 | 14 | AB020683 |
| cDNA FLJ13700 fis, clone PLACE2000216 | Increase | 15 | (nearest = Q0108 | 16 | AK023762 |
| | | | 2) | | |
| DKFZP586G1122 protein | Increase | 17 | CAB55938 | 18 | AL117462 |
| Putative zinc finger protein LOC55818 | Increase | 19 | AAF67005 | 20 | AF155648 |
| hypothetical protein PRO0823 | Increase | 21 | AAF71073 | 22 | AF116653 |
| hypothetical protein FLJ10134 | Increase | 23 | BAA91458 | 24 | AK000996 |
| hypothetical protein FLJ20500 | Increase | 25 | BAA91214 | 26 | AK000507 |
| DKFZP564D116 protein | Increase | 27 | CAB43242 | 28 | AL050022 |
| KIAA1376 protein | Increase | 29 | BAA92614 | 30 | AB037797 |
| hypothetical protein KIAA0127 | Increase | 31 | BAA09476 | 32 | D50917 |
| hypothetical protein FLJ20308 | Increase | 33 | BAA91078 | 34 | AL137263 |
| hypothetical nuclear factor SBBI22 | Repression | 35 | NP_065128 | 36 | NM_020395 |
| DKFZP434I116 protein | Repression | 37 | CAB55922 | 38 | AL117434 |
| hypothetical prot. FLJ10206 | Repression | 39 | NP_060495 | 40 | NM_018025 |
| hypothetical protein FLJ10815 | Repression | 41 | BAA91830 | 42 | AK001677 |
| hypothetical protein FLJ11100 | Repression | 43 | BAA92003 | 44 | AK001962 |
| hypothetical protein FLJ2064 | Repression | 45 | NP_060387 | 46 | NM_017917 |
| hypothetical protein HSPC111 | Repression | 47 | NP_057475 | 48 | NM_016391 |
| hypothetical protein LOC51251 | Repression | 49 | NP_057573 | 50 | NM_016489 |
| KIAA0014 | Repression | 51 | BAA04946 | 52 | D25216 |
| hypothetical protein HSPC196 | Repression | 53 | NP_057548 | 54 | NM_016464 |
| hypothetical protein FLJ11296 | Repression | 55 | BAA92115 | 56 | AK002158 |
| hypothetical protein bA395L14 | Repression | 57 | CAB62980 | 58 | AL022311 |
| cDNA FLJ13016 fis, clone NT2RP3000624 | Repression | 59 | BAB14393 | 60 | AK023078 |
| cDNA DKFZp586H0324 clone DKFZp586H0324 | Increase | 61 | none | 62 | AL110163 |
| Clone 23785 | Increase | 63 | none | 64 | AF035307 |
| cDNA DKFZp586E1624 | Increase | 65 | none | 66 | AL110152 |
| cDNA FLJ14162 fis, clone NT2RM4002504 | Increase | 67 | none | 68 | AK024224 |
| cDNA DKFZp434E1723 (clone DKFZp434E1723) | Increase | 69 | none | 70 | AL137473 |
| cDNA FLJ11041 fis, clone PLACE1004405 | Increase | 71 | none | 72 | AK001903 |
| cDNA FLJ10433 fis NT2RP1000478 | Increase | 73 | none | 74 | AK001295 |
| cDNA DKFZp434O071 | Increase | 75 | none | 76 | AF125392 |
| cDNA FLJ23313 fis, clone HEP11919 | Increase | 77 | none | 78 | AK026966 |
| ESTs | Increase | 79 | none | 80 | R62339 |
| ESTs | Increase | 81 | none | 82 | AA489477 |
| ESTs | Increase | 83 | none | 84 | R06601 |
| ESTs | Increase | 85 | none | 86 | R00332 |
| ESTs | Increase | 87 | none | 88 | AA463469 |
| ESTs | Increase | 89 | none | 90 | H56028 |
| ESTs | Increase | 91 | none | 92 | AA293300 |
| ESTs | Increase | 93 | none | 94 | AW250104 |
| ESTs | Increase | 95 | none | 96 | BE382614 |
| ESTs | Increase | 97 | none | 98 | H59618 |
| ESTs | Increase | 99 | none | 100 | AA449703 |
| ESTs | Increase | 101 | none | 102 | AA521311 |
| ESTs | Increase | 103 | none | 104 | W69170 |
| ESTs | Increase | 105 | none | 106 | R51835 |
| ESTs | Increase | 107 | none | 108 | H87770 |
| ESTs | Increase | 109 | none | 110 | R69248 |
| ESTs | Increase | 111 | none | 112 | T68844 |
| ESTs | Increase | 113 | none | 114 | AA454177 |
| ESTs | Increase | 115 | none | 116 | AA026562 |
| ESTs | Increase | 117 | none | 118 | T73780 |
| ESTs | Increase | 119 | none | 120 | AA401496 |
| ESTs | Increase | 121 | none | 122 | AA489636 |
| ESTs | Increase | 123 | none | 124 | AA446361 |
| ESTs | Increase | 125 | none | 126 | AA931411 |
| ESTs | Increase | 127 | none | 128 | R24223 |
| ESTs | Increase | 129 | none | 130 | R22252 |
| ESTs | Increase | 131 | none | 132 | AA612751 |
| ESTs | Increase | 133 | none | 134 | AW964331 |
| ESTs | Increase | 135 | none | 136 | AI018611 |
| ESTs | Increase | 137 | none | 138 | AA451886 |
| ESTs | Increase | 139 | none | 140 | R06520 |
| ESTs | Increase | 141 | none | 142 | T48278 |
| ESTs | Increase | 143 | none | 144 | R68736 |
| cDNA FLJ14028 fis, clone HEMBA1003838 | Repression | 145 | none | 146 | AK024090 |
| cDNA DKFZp564D016 (clone DKFZp564D016) | Repression | 147 | none | 148 | AL050021 |
| cDNA FLJ11302 fis, clone PLACE1009971 | Repression | 149 | none | 150 | AK002164 |
| NEDO FLJ10309 fis cl NT2RM2000287 | Repression | 151 | none | 152 | AK001171 |
| Sequence from clone RP11-394O2 on ch 20 | Repression | 153 | none | 154 | AK022731 |
| ESTs | Repression | 155 | none | 156 | AA420992 |
| ESTs | Repression | 157 | none | 158 | AA693797 |
| ESTs | Repression | 159 | none | 160 | AA456437 |
| ESTs | Repression | 161 | none | 162 | AA429367 |
| ESTs | Repression | 163 | none | 164 | AA434382 |
| ESTs | Repression | 165 | none | 166 | AA664228 |
| ESTs | Repression | 167 | none | 168 | R44397 |
| ESTs | Repression | 169 | none | 170 | AA923509 |
| ESTs | Repression | 171 | none | 172 | W87747 |
| ESTs | Repression | 173 | none | 174 | AA973568 |
| ESTs | Repression | 175 | none | 176 | T98529 |
| ESTs | Repression | 177 | none | 178 | AA022679 |
| ESTs | Repression | 179 | none | 180 | H17921 |
| ESTs | Repression | 181 | none | 182 | R00766 |
| ESTs | Repression | 183 | none | 184 | W91958 |
| ESTs | Repression | 185 | none | 186 | R63694 |
| ESTs | Repression | 187 | none | 188 | AA425386 |
| ESTs | Repression | 189 | none | 190 | AA909912 |
| ESTs | Repression | 191 | none | 192 | T99032 |
| ESTs | Repression | 193 | none | 194 | H52503 |
| ESTs | Repression | 195 | none | 196 | AA127017 |
| ESTs | Repression | 197 | none | 198 | R38647 |
| ESTs | Repression | 199 | none | 200 | T87233 |
| ESTs | Repression | 201 | none | 202 | AA130351 |
| ESTs | Repression | 203 | none | 204 | H49601 |
| ESTs | Repression | 205 | none | 206 | AA598952 |
| ESTs | Repression | 207 | none | 208 | AA991868 |
| ESTs | Repression | 209 | none | 210 | T60111 |
| ESTs | Repression | 211 | none | 212 | AA897090 |
| ESTs | Repression | 213 | none | 214 | AA679939 |
| ESTs | Repression | 215 | none | 216 | AA630167 |
| BCL2/adenovirus E1B 19kD-interacting protein 3-like | Increase | 217 | NP_004322 | 218 | NM_004331 |
| Solute carrier family 2, member 1 | Increase | 219 | NP_006507 | 220 | NM_006516 |
| PDGF beta | Increase | 221 | NP_002599 | 222 | NM_002608 |
| lactate dehydrogenase A | Increase | 223 | NP_005557 | 224 | NM_005566 |
| Tissue factor | Increase | 225 | NP_001984 | 226 | NM_001993 |
| Vascular endothelial growth factor | Increase | 227 | NP_003367 | 228 | NM_003376 |
| RTP/NDRG1 | Increase | 229 | NP_006087 | 230 | NM_006096 |
| Procollagen-proline 4-hydroxylase alpha 1 | Increase | 231 | NP_000908 | 232 | NM_000917 |
| BCL2/adenovirus E1B-interacting protein 3 | Increase | 233 | NP_004043 | 234 | NM_004052 |
| Plasminogen activator inhibitor, type I | Increase | 235 | AAA60003 | 236 | M16006 |
| Cyclooxygenase 2 | Increase | 237 | AAA57317 | 238 | U04636 |
| Metallothionein 1H | Increase | 239 | CAA46046 | 240 | X64834 |
| Metallothionein 1L | Increase | 241 | P80297 | 242 | AJ011772 |
| Metallothionein-IG | Increase | 243 | AAA59873 | 244 | J03910 |
| Metallothionein 1E (functional) | Increase | 245 | AAA59587 | 246 | M10942 |
| Solute carrier family 2, member 3 | Increase | 247 | AAB61083 | 248 | M20681 |
| Hexokinase 2 | Increase | 249 | CAA86511 | 250 | Z46376 |
| Interleukin 8 | Increase | 251 | CAA68742 | 252 | Y00787 |
| Glyceraldehyde-3-phosphate dehydrogenase | Increase | 253 | NP_002037 | 254 | NM_002046 |
| Phosphoglycerate kinase 1 | Increase | 255 | NP_000282 | 256 | NM_000291 |
| Enolase 1 | Increase | 257 | NP_001419 | 258 | NM_001428 |
| aldolase C, fructose-bisphosphate (ALDOC) | Increase | 259 | NP_005156 | 260 | NM_005165 |
| Triosephosphate isomerase 1 (TPI1) | Increase | 261 | NP_000356 | 262 | NM_000365 |
| Adenylate kinase 3 (AK3) | Increase | 263 | NP_037542 | 264 | NM_013410 |
| Metallothionein-2a | Increase | 265 | AAA59583 | 266 | J00271 |
| Osteopontin | Increase | 267 | CAA31984 | 268 | X13694 |
| Granulin | Increase | 269 | AAA58617 | 270 | AK000607 |
| Hypoxia-inducible protein 2 | Increase | 271 | NP_037464 | 272 | NM_013332 |
| Enolase 2, (gamma, neuronal) | Increase | 273 | NP_001966 | 274 | NM_001975 |
| Glycogen synthase 1 (muscle) | Increase | 275 | AAB60385 | 276 | U32573 |
| Activated leucocyte cell adhesion molecule | Increase | 277 | NP_001618 | 278 | NM_001627 |
| MAX-interacting protein 1 | Increase | 279 | NP_005953 | 280 | NM_005962 |
| Nuclear receptor co-repressor | Increase | 281 | NP_006302 | 282 | NM_006311 |
| Chitinase 3-like 2 | Increase | 283 | AAC50597 | 284 | U49835 |
| BACH1 transcription factor | Increase | 285 | NP_001177 | 286 | NM_001186 |
| Phosphoglucomutase 1 | Increase | 287 | NP_002624 | 288 | NM_002633 |
| CGI-109 protein | Increase | 289 | AAD34104 | 290 | AF151867 |
| SAP30 | Increase | 291 | NP_003855 | 292 | NM_003864 |
| ATP-binding cassette transporter-1 | Increase | 293 | NP_005493 | 294 | NM_005502 |
| SEC24 protein | Increase | 295 | CAA10334 | 296 | AJ131244 |
| Trinucleotide repeat containing 3 | Increase | 297 | NP_005869 | 298 | NM_005878 |
| Post-synaptic density protein 95 | Increase | 299 | AAC52113 | 300 | U83192 |
| Tumor protein D52 | Increase | 301 | NP_005070 | 302 | NM_005079 |
| Cyclin-dependent kinase inhibitor p27kip1 | Increase | 303 | NP_004055 | 304 | NM_004064 |
| phosphoinositide-3-kinase, catalytic, beta | Increase | 305 | NP_006210 | 306 | NM_006219 |
| Solute carrier family 5, member 3 | Increase | 307 | NP_008864 | 308 | NM_006933 |
| PSCDBP | Increase | 309 | NP_004279 | 310 | NM_004288 |
| Solute carrier family 2, member 5 | Increase | 311 | AAA52570 | 312 | M55531 |
| Adipophilin | Increase | 313 | NP_001113 | 314 | NM_001122 |
| Early development regulator 2 | Increase | 315 | NP_004418 | 316 | NM_004427 |
| B-cell translocation gene 1, | Increase | 317 | NP_001722 | 318 | NM_001731 |
| SH3PX1 | Increase | 319 | NP_057308 | 320 | NM_016224 |
| Cyclin G2 | Increase | 321 | NP_004345 | 322 | NM_004354 |
| NAG-5 protein | Increase | 323 | NP_057530 | 324 | NM_016446 |
| Cytochrome P450 IB1 (dioxin-inducible) | Increase | 325 | NP_000095 | 326 | NM_000104 |
| Butyrate response factor 1 | Increase | 327 | NP_004917 | 328 | NM_004926 |
| p8 protein (candidate of metastasis 1) | Increase | 329 | NP_036517 | 330 | NM_012385 |
| chemokine (C-X-C motif), receptor 4 (CXCR4) | Increase | 331 | NP_003458 | 332 | NM_003467 |
| solute carrier family 16, member 6 | Increase | 333 | AAC52014 | 334 | U79745 |
| Proline-rich protein with nuclear targeting signal (B4-2) | Increase | 335 | NP_006804 | 336 | NM_006813 |
| RNA helicase-related protein | Increase | 337 | AAC32396 | 338 | AF083255 |
| Cytochrome P450, subfamily XXVIIB, polypeptide 1 | Increase | 339 | BAA22656 | 340 | AB005989 |
| SHB adaptor protein | Increase | 341 | CAA53091 | 342 | X75342 |
| Papillomavirus regulatory factor (PRF-1) | Increase | 343 | NP_061130 | 344 | NM_018660 |
| SLC31A2/hCTR1 | Increase | 345 | NP_001851 | 346 | NM_001860 |
| UDP-glucose pyrophosphorylase 2 (UGP2) | Increase | 347 | NP_006750 | 348 | NM_006759 |
| Proline 4-hydroxylase, alpha polypeptide II | Increase | 349 | NP_004190 | 350 | NM_004199 |
| Stearoyl-CoA desaturase | Increase | 351 | BAA93510 | 352 | AB032261 |
| Diacylglycerol kinase, zeta | Increase | 353 | NP_003637 | 354 | NM_003646 |
| Serine protease 11 | Increase | 355 | BAA13322 | 356 | Y07921 |
| IL-1 receptor antagonist, alternatively spliced forms | Increase | 357 | AAB92268, | 358 | U65590 |
| | | | AAB92269, | | |
| | | | AAB92270 | | |
| NS1-binding protein | Increase | 359 | NP_006460 | 360 | NM_006469 |
| Activin A receptor type I | Increase | 361 | NP_001096 | 362 | NM_001105 |
| FGF receptor activating protein 1 (FRAG1) | Increase | 363 | AAF19156 | 364 | AF159621 |
| Galectin-8 | Increase | 365 | AAF19370 | 366 | AF193806 |
| Glucose 6-phosphate isomerase | Increase | 367 | NP_000166 | 368 | NM_000175 |
| D123 protein | Increase | 369 | AAC34738 | 370 | U27112 |
| Dec1. | Increase | 371 | NP_003661 | 372 | NM_003670 |
| Rab-8b | Increase | 373 | NP_057614 | 374 | NM_016530 |
| BL34 | Increase | 375 | AAB26289 | 376 | S59049 |
| Polyubiquitin UbC | Increase | 377 | BAA23632 | 378 | AB009010 |
| Integrin alpha 5 | Increase | 379 | NP_002196 | 380 | NM_002205 |
| Jk-recombination signal binding protein | Increase | 381 | AAA60258 | 382 | L07872 |
| DEAD-box protein abstrakt | Increase | 383 | NP_057306 | 384 | NM_016222 |
| High mobility group 2 protein | Increase | 385 | AAA58659 | 386 | M83665 |
| Decidual protein induced by progesterone | Increase | 387 | NP_008952 | 388 | NM_007021 |
| GM2 ganglioside activator protein. | Increase | 389 | CAA43993, | 390 | X62078 |
| | | | CAA43994 | | |
| CCR4 associated factor 1 (CAF1) | Increase | 391 | AAD02685 | 392 | AF053318 |
| Nucleoside phosphorylase | Repression | 393 | NP_000261 | 394 | NM_000270 |
| Monocyte chemotactic protein 1 | Repression | 395 | NP_002973 | 396 | NM_002982 |
| Endothelin 1 | Repression | 397 | NP_001946 | 398 | NM_001955 |
| Heat shock 70kD protein 4 | Repression | 399 | AAA02807 | 400 | L12723 |
| Annexin AI | Repression | 401 | NP_000691 | 402 | NM_000700 |
| p67 myc protein | Repression | 403 | CAA25105, | 404 | X00364 |
| | | | CAA25106 | | |
| Alpha-2-macroglobulin | Repression | 405 | NP_000005 | 406 | NM_000014 |
| Macrophage inflammatory protein 1b | Repression | 407 | NP_002975 | 408 | NM_002984 |
| Sex hormone-binding globulin | Repression | 409 | NP_001031 | 410 | NM_001040 |
| ATP-binding cassette, sub-family E (OABP), member 1 | Repression | 411 | NP_002931 | 412 | NM_002940 |
| Chaperonin/Tcp zeta 1 | Repression | 413 | NP_001753 | 414 | NM_001762 |
| Colony stimulating factor 1 (macrophage) | Repression | 415 | AAA59573 | 416 | M27087 |
| Dendritic cell protein (GA17) | Repression | 417 | NP_006351 | 418 | NM_006360 |
| G protein-coupled receptor 44 | Repression | 419 | NP_004769 | 420 | NM_004778 |
| Keratin 6A | Repression | 421 | NP_005545 | 422 | NM_005554 |
| lymphocyte adaptor protein | Repression | 423 | NP_005466 | 424 | NM_005475 |
| Neuro-oncological ventral antigen 1 | Repression | 425 | AAA16022 | 426 | U04840 |
| N-SMase/FAN | Repression | 427 | CAA65405 | 428 | X96586 |
| Peptidylprolyl isomerase F (cyclophilin F) | Repression | 429 | NP_005720 | 430 | NM_005729 |
| PLECKSTRIN | Repression | 431 | NP_002655 | 432 | NM_002664 |
| High affinity immunoglobulin epsilon receptor beta | Repression | 433 | AAF17243 | 434 | AF201951 |
| Ribosomal protein L44 | Repression | 435 | NP_000992 | 436 | NM_001001 |
| Solute carrier family 6 No 1 | Repression | 437 | NP_003033 | 438 | NM_003042 |
| Synaptopodin | Repression | 439 | NP_009217 | 440 | NM_007286 |
| TERA protein | Repression | 441 | AAF87322 | 442 | AF212220 |
| TGF beta-stimulated protein TSC-22 | Repression | 443 | NP_006013 | 444 | NM_006022 |
| Tubulin, beta, 2 | Repression | 445 | NP_006079 | 446 | NM_006088 |
| Calgranulin A | Repression | 447 | NP_002955 | 448 | NM_002964 |
| Replication factor C (145 KDa) | Repression | 449 | NP_002904 | 450 | NM_002913 |
| Signal recognition particle 19 kD protein | Repression | 451 | NP_003126 | 452 | NM_003135 |
| Transcription factor SUPT3H | Repression | 453 | NP_003590 | 454 | NM_003599 |
| Proteasome component C9 | Repression | 455 | NP_002780 | 456 | NM_002789 |
| Maf-related leucine zipper homolog | Repression | 457 | NP_005452 | 458 | NM_005461 |
| dynein, cytoplasmic, light intermediate polypeptide 2 | Repression | 459 | NP_006132 | 460 | NM_006141 |
| Heterochromatin-like protein 1 | Repression | 461 | NP_057671 | 462 | NM_016587 |
| Monocyte chemotactic protein 3 | Repression | 463 | NP_006264 | 464 | NM_006273 |
| Fatty-acid-Coenzyme A ligase, long-chain 2 | Repression | 465 | BAA00931 | 466 | D10040 |
| Programmed cell death 5/TFAR19 | Repression | 467 | NP_004699 | 468 | NM_004708 |
| Small inducible cytokine A3 | Repression | 469 | AAA36316 | 470 | M23452 |
| Cytochrome c oxidase subunit VIc | Repression | 471 | NP_004365 | 472 | NM_004374 |
| NASP histone-binding prot. | Repression | 473 | NP_002473 | 474 | NM_002482 |
| Ecotropic viral integration site 2A | Repression | 475 | NP_055025 | 476 | NM_014210 |
| Sjogren syndrome antigen B | Repression | 477 | AAA51885 | 478 | J04205 |
| Monocyte chemotactic protein 2 | Repression | 479 | NP_005614 | 480 | NM_005623 |
| GRO2/macrophage inflammatory protein 2a | Repression | 481 | NP_002080 | 482 | NM_002089 |
| Small nuclear ribonucleoprotein SM D 1 | Repression | 483 | NP_008869 | 484 | NM_006938 |
| GRO1/macrophage inflammatory protein 2 precursor | Repression | 485 | NP_001502 | 486 | NM_001511 |
| Lymphocyte adhesion molecule 1 | Repression | 487 | NP_000646 | 488 | NM_000655 |

[1025] TABLE 27
cross-references all protein and nucleotide sequences (SEQ ID NOS) that are referenced
herein to accession numbers in public databases available as of 8.12.01.

| | | | Protein | | | |
|---|---|---|---|---|---|---|
| Clone | | | SEQ ID | Protein | Nucleotide | |
| ID | New Name | Old Name | NO: | Accession | SEQ ID NO: | GenBank Locus |
| p1F12 | hypothetical protein FLJ13611 | cDNA FLJ13611 fis, clone | 1 | NP_079217 | 2 | NM_024941 |
| | | PLACE1010802 | | | | |
| p1F2 | hypothetical protein FLJ20037 | hypothetical protein FLJ20037 | 3 | CAB65981 | 4 | NM_017633 |
| p1F10 | hypothetical protein | hypothetical protein | 5 | T46364 | 6 | NM_017593 |
| | DKFZp434P0116 | DKFZp434P0116 | | | | |
| p1F19 | hypothetical protein KIAA0212 | KIAA0212 | 7 | BAA13203 | 8 | NM_014674 |
| p1F8 | hypothetical protein KIAA0914 | KIAA0914 | 9 | NP_055698 | 10 | NM_014883 |
| p1F5 | hypothetical protein FLJ20281 | hypothetical protein FLJ20281 | 11 | XP_008736 | 12 | NM_017742 |
| p1F18 | hypothetical protein KIAA0876 | KIAA0876 | 13 | BAA74899 | 14 | XM_035625 |
| p1F7 | Spectrin, beta, non-erythrocytic 1 | cDNA FLJ13700 fis, clone | 15 | NP_003119 | 16 | NM_003128 |
| | | PLACE2000216 | | | | |
| p1F21 | Hematopoietic Zinc finger protein | DKFZP586G1122 protein | 17 | AAL08625 | 18 | AK024404 |
| p1F9 | hypothetical protein KIAA0742 | Putative zinc finger protein | 19 | NP_060903 | 20 | AB018285 |
| | | LOC55818 | | | | |
| p1E13 | hypothetical protein PRO0823 | hypothetical protein PRO0823 | 21 | AAF71073 | 22 | AF116653 |
| p1D1 | hypothetical protein FLJ10134 | hypothetical protein FLJ10134 | 23 | NP_060474 | 24 | NM_018004 |
| p1D2 | hypothetical protein FLJ10134 | hypothetical protein FLJ10134 | 23 | NP_060474 | 24 | NM_018004 |
| p1D4 | hypothetical protein FLJ20500 | hypothetical protein FLJ20500 | 25 | NP_061931 | 26 | NM_019058 |
| p1D9 | hypothetical protein | DKFZP564D116 protein | 27 | T08708 | 28 | AL050022 |
| | DKFZP564D116 | | | | | |
| p1D12 | hypothetical protein KIAA1376 | KIAA1376 protein | 29 | BAA92614 | 30 | AB037797 |
| p1D15 | TRIP-Br2 | hypothetical protein KIAA0127 | 31 | NP_055570 | 32 | NM_014755 |
| p1D16 | hypothetical protein FLJ20308 | hypothetical protein FLJ20308 | 33 | XP_039852 | 34 | AK000315 |
| p1J13 | hypothetical nuclear factor | hypothetical nuclear factor | 35 | NP_065128 | 36 | NM_020395 |
| | SBBI22 | SBBI22 | | | | |
| p1I22 | hypothetical protein KIAA1429 | DKFZP434I116 protein | 37 | BAA92667 | 38 | AB037850 |
| p1J6 | hypothetical protein FLJ10206 | hypothetical prot. FLJ10206 | 39 | AAH06108 | 40 | NM_018025 |
| p1I5 | hypothetical protein FLJ10815 | hypothetical protein FLJ10815 | 41 | BAA91830 | 42 | NM_018231 |
| p1I13 | hypothetical protein FLJ11100 | hypothetical protein FLJ11100 | 43 | NP_060701 | 44 | NM_018321 |
| p1I17 | hypothetical protein FLJ20644 | hypothetical protein FLJ2064 | 45 | NP_060387 | 46 | NM_017917 |
| p1I15 | hypothetical protein CGI-117 | hypothetical protein HSPC111 | 47 | Q9Y3C1 | 48 | NM_016391 |
| p1I7 | Uridine 5′ monophosphate | hypothetical protein LOC51251 | 49 | NP_057573 | 50 | NM_016489 |
| | hydrolase 1 | | | | | |
| | hypothetical protein KIAA0014 | KIAA0014 | 51 | NP_055480 | 52 | NM_014665 |
| p1I4 | hypothetical protein HSPC196 | hypothetical protein HSPC196 | 53 | NP_057548 | 54 | NM_016464 |
| p1I8 | hypothetical protein FLJ11296 | hypothetical protein FLJ11296 | 55 | XP_004747 | 56 | NM_018384 |
| p1I16 | hypothetical protein KIAA1668 | hypothetical protein bA395L14 | 57 | BAB33338 | 58 | AB051455 |
| p1I11 | SECIS binding protein 2 | cDNA FLJ13016 fis, clone | 59 | AAK57518 | 60 | AF380995 |
| | | NT2RP3000624 | | | | |
| p1E8 | cDNA: FLJ22249 fis, clone | cDNA DKFZp586H0324 clone | 61 | None | 62 | AK025902 |
| | HRC02674 | DKFZp586H0324 | | | | |
| p1E18 | Plexin C1 | Clone 23785 | 63 | NP_005752 | 64 | NM_005761 |
| p1E16 | cDNA DKFZp586E1624 | cDNA DKFZp586E1624 | 65 | None | 66 | AL110152 |
| p1D5 | ERO1 (S. cerevisiae)-like | cDNA FLJ14162 fis, clone | 67 | NP_055399 | 68 | NM_014584 |
| | | NT2RM4002504 | | | | |
| p1D6 | ERO1 (S. cerevisiae)-like | cDNA FLJ14162 fis, clone | 67 | NP_055399 | 68 | NM_014584 |
| | | NT2RM4002504 | | | | |
| p1E12 | hypothetical protein | cDNA DKFZp434E1723 (clone | 69 | XP_05338 | 70 | BC010005 |
| | DKFZP434E1723 | DKFZp434E1723) | | | | |
| p1E10 | cDNA FLJ11041 fis, clone | CDNA FLJ11041 fis, clone | 71 | None | 72 | AK001903 |
| | PLACE 1004405 | PLACE1004405 | | | | |
| p1C21 | Tubulin, beta, 4 | cDNA FLJ10433 fis | 73 | NP_006077 | 74 | NM_006086 |
| | | NT2RP1000478 | | | | |
| pID10 | Insulin induced protein 2 | cDNA DKFZp434O071 | 75 | AAD43048 | 76 | AF125392 |
| p1D13 | Adenylate kinase 3 | cDNA FLJ23313 fis, clone | 77 | NP_037542 | 78 | NM_013410 |
| | | HEP11919 | | | | |
| p1E9 | Novel PI-3-kinase adapter | ESTs | 79 | None | 80 | R62339 |
| p1F1 | EST | ESTs | 81 | None | 82 | AA489477 |
| p1E7 | Novel Metallothionein | ESTs | 83 | None | 84 | R06601 |
| p1E6 | EGL nine (C. elegans) homolog 3 | ESTs | 85 | NP_071356 | 86 | NM_022073 |
| p2B1 | PRAME | ESTs | 87 | NP_006106 | 88 | NM_006115 |
| p1D14 | C1orf12 | ESTs | 89 | NP_071334 | 90 | NM_022051 |
| p1D17 | Semaphorin 4b | ESTs | 91 | BAB21836 | 92 | AB051532 |
| p1P14 | Semaphorin 4b | ESTs | 91 | BAB21836 | 92 | AB051532 |
| p1C24 | SLC25A19 | ESTs | 93 | NP_068380 | 94 | NM_021734 |
| p1D3 | Serine carboxypeptidase 1 | ESTs | 95 | NP_067639 | 96 | NM_021626 |
| p1E14 | Unknown mRNA (schizophrenia- | ESTs | 97 | None | 98 | AY010112 |
| | linked) | | | | | |
| p1E20 | Myo-inositol monophosphatase | ESTs | 99 | AAK52336 | 100 | NM_017813 |
| | A3 | | | | | |
| p2A24 | EST | ESTs | 101 | None | 102 | AA521314 |
| p1E17 | hypothetical protein FLJ31668 | ESTs | 103 | BAB71124 | 104 | AK056230 |
| p1E19 | EST | ESTs | 105 | None | 106 | R51835 |
| p1E15 | cDNA YI27F12 | ESTs | 107 | None | 108 | AF075018 |
| p1E11 | EST | ESTs | 109 | None | 110 | R69248 |
| p1E23 | cDNA FLJ14041 fis, clone | ESTs | 111 | None | 112 | AK024103 |
| | HEMBA1005780 | | | | | |
| p1E21 | Glutamate-cysteine ligase, | ESTs | 113 | NP_002052 | 114 | NM_002061 |
| | modifier subunit | | | | | |
| p1D23 | PTEN | ESTs | 115 | NP_000305 | 116 | NM_000314 |
| p1D24 | EST | ESTs | 117 | None | 118 | T73780 |
| p1D22 | MAX-interacting protein 1 | ESTs | 119 | NP_005953 | 120 | NM_005962 |
| p1E2 | Mannosidase, alpha, class 1A, | ESTs | 121 | NP_005898 | 122 | NM_005907 |
| | member 1 | | | | | |
| p1E1 | EST | ESTs | 123 | None | 124 | AA446361 |
| p1E4 | EST | ESTs | 125 | None | 126 | AA931411 |
| p1D18 | cDNA FLJ13443 fis, clone | ESTs | 127 | None | 128 | AK023505 |
| | PLACE1002853 | | | | | |
| p1D21 | hypothetical protein FLJ22622 | ESTs | 129 | BAB15424 | 130 | NM_025151 |
| p1C22 | CD84-H1 | ESTs | 131 | AAK69052 | 132 | AF275725 |
| p1C23 | hypothetical protien FLJ12832 | ESTs | 133 | XP_043394 | 134 | AK022894 |
| p1D11 | EST | ESTs | 135 | None | 136 | AA251748 |
| p1E3 | CYP1B1 | ESTs | 137 | NP_000095 | 138 | NM_000104 |
| p1D20 | hypothetical protein KIAA1125 | ESTs | 139 | XP_012932 | 140 | AB032951 |
| p1E5 | Hepcidin antimicrobial peptide | ESTs | 141 | NP_066998 | 142 | NM_021175 |
| p1D19 | EST | ESTs | 143 | None | 144 | R68736 |
| p2A15 | Sialyltransferase | cDNA FLJ14028 fis, clone | 145 | NP_006447 | 146 | NM_006456 |
| | | HEMBA1003838 | | | | |
| p1I14 | cDNA DKFZp564D016 | cDNA DKFZp564D016 (clone | 147 | None | 148 | AL050021 |
| | | DKFZp564D016) | | | | |
| p1I2 | cDNA FLJ11302 fis, clone | cDNA FLJ11302 fis, clone | 149 | None | 150 | AK002164 |
| | PLACE1009971 | PLACE1009971 | | | | |
| p1I12 | hypothetical protein MGC4549 | NEDO FLJ10309 fis cl | 151 | XP_032794 | 152 | NM_032377 |
| | | NT2RM2000287 | | | | |
| p1I3 | ELMO2 | Sequence from clone RP11- | 153 | AAL14467 | 154 | XM_012933 |
| | | 394O2 on ch 20 | | | | |
| p1I10 | EST | ESTs | 155 | None | 156 | AA420992 |
| p1H18 | Ubiquitin specific protease 7 | ESTs | 157 | NP_003461 | 158 | NM_003470 |
| p1H24 | Nucleolar phosphoprotein Nopp34 | ESTs | 159 | NP_115766 | 160 | NM_032390 |
| p1E22 | cDNA FLJ13618 fis, clone | ESTs | 161 | None | 162 | AK023680 |
| | PLACE1010925 | | | | | |
| p1H21 | hypothetical protein FLJ13511 | ESTs | 163 | NP_149014 | 164 | NM_033025 |
| p1I1 | Ribosomal RNA intergenic spacer | ESTs | 165 | None | 166 | AA664228 |
| p1H14 | EST | ESTs | 167 | None | 168 | R44397 |
| p1H11 | Carboxypeptidase M | ESTs | 169 | NP_001865 | 170 | NM_001874 |
| p1H17 | EST | ESTs | 171 | None | 172 | W87747 |
| p1H12 | EST | ESTs | 173 | None | 174 | AA973568 |
| p1H7 | EST | ESTs | 175 | None | 176 | T98529 |
| p1H15 | EST | ESTs | 177 | None | 178 | AA022679 |
| p1H20 | EST | ESTs | 179 | None | 180 | H17921 |
| p1H8 | ABL | ESTs | 181 | NP_009297 | 182 | NM_007313 |
| p1H16 | EST | ESTs | 183 | None | 184 | W91958 |
| p1H9 | EST | ESTs | 185 | None | 186 | R63694 |
| p1H23 | hypothetical protein FLJ21094 | ESTs | 187 | AAH14003 | 188 | AK024747 |
| p1H10 | EST | ESTs | 189 | None | 190 | AA909912 |
| p1H6 | EST | ESTs | 191 | None | 192 | T99032 |
| p1H13 | EST | ESTs | 193 | None | 194 | H52503 |
| p1H19 | EST | ESTs | 195 | None | 196 | AA127017 |
| p1G22 | EST | ESTs | 197 | None | 198 | R38647 |
| p1G21 | EST | ESTs | 199 | None | 200 | T87233 |
| p1H1 | hypothetical protein FLJ10826 | ESTs | 201 | BAB14226 | 202 | NM_018233 |
| p1G20 | cDNA YO23H03 | ESTs | 203 | None | 204 | AF075053 |
| p1H5 | hypothetical protein FLJ22690 | ESTs | 205 | NP_078987 | 206 | NM_024711 |
| p1G19 | Mitochondrion sequence | ESTs | 207 | AAH05845 | 208 | BC005845 |
| p1H2 | Fatty acid binding protein 5 | ESTs | 209 | NP_001435 | 210 | NM_001444 |
| p1G18 | Mitochondrion sequence | ESTs | 211 | None | 212 | BC001612 |
| p1H4 | EST | ESTs | 213 | None | 214 | AA679939 |
| p1H3 | EST | ESTs | 215 | None | 216 | AA630167 |
| | BCL2/adenovirus E1B 19kD- | BCL2/adenovirus E1B19 kD- | 217 | NP_004322 | 218 | NM_004331 |
| | interacting protein 3-like | interacting protein 3-like | | | | |
| | SLC2A1 | Solute carrier family 2, member | 219 | NP_006507 | 220 | NM_006516 |
| | | 1 | | | | |
| p1P3 | PDGFB | PDGF beta | 221 | NP_148937 | 222 | NM_033016 |
| p1A8 | Lactate dehydrogenase A | lactate dehydrogenase A | 223 | NP_005557 | 224 | NM_005566 |
| p1A9 | Lactate dehydrogenase A | lactate dehydrogenase A | 223 | NP_005557 | 224 | NM_005566 |
| p1B17 | Tissue factor | Tissue factor | 225 | NP_001984 | 226 | NM_001993 |
| p1O20 | VEGF | Vascular endothelial growth | 227 | NP_003367 | 228 | NM_003376 |
| | | factor | | | | |
| p1B2 | N-myc downstream regulated | RTP/NDRG1 | 229 | NP_006087 | 230 | NM_006096 |
| p1B3 | Proline 4-hydroxylase, alpha | Procollagen-proline 4- | 231 | NP_000908 | 232 | NM_000917 |
| | polypeptide I | hydroxylase alpha 1 | | | | |
| | BCL2/adeno virus E1B-interacting | BCL2/adenovirus E1B- | 233 | NP_004043 | 234 | NM_004052 |
| | protein 3 | interacting protein 3 | | | | |
| p1B18 | Plasminogen activator inhibitor, | Plasminogen activator inhibitor, | 235 | NP_000593 | 236 | NM_000602 |
| | type 1 | type I | | | | |
| p1B19 | Plasminogen activator inhibitor, | Plasminogen activator inhibitor, | 235 | NP_000593 | 236 | NM_000602 |
| | type 1 | type I | | | | |
| p1N17 | COX-2 | Cyclooxygenase 2 | 237 | NP_000954 | 238 | NM_000963 |
| p1A24 | Metallothionein 1H | Metallothionein 1H | 239 | NP_005942 | 240 | NM_005951 |
| | Metallothionein 1L | Metallothionein 1L | 241 | NP_002441 | 242 | NM_002450 |
| p1B1 | Metallothionein 1G | Metallothionein-IG | 243 | NP_005941 | 244 | NM_005950 |
| | Metallothionein 1E (functional) | Metallothionein 1E (functional) | 245 | None | 246 | AA872383 |
| p1A1 | SLC2A3 | Solute carrier family 2, member | 247 | NP_008862 | 248 | NM_006931 |
| | | 3 | | | | |
| p1A2 | SLC2A3 | Solute carrier family 2, member 3 | 247 | NP_008862 | 248 | NM_006931 |
| p1A3 | SLC2A3 | Solute carrier family 2, member | 247 | NP_008862 | 248 | NM_006931 |
| | | 3 | | | | |
| p1A4 | SLC2A3 | Solute carrier family 2, member 3 | 247 | NP_008862 | 248 | NM_006931 |
| p1A15 | Hexokinase-2 | Hexokinase 2 | 249 | NP_000180 | 250 | NM_000189 |
| p1A16 | Hexokinase-2 | Hexokinase 2 | 249 | NP_000180 | 250 | NM_000189 |
| p1A17 | Hexokinase-2 | Hexokinase 2 | 249 | NP_000180 | 250 | NM_000189 |
| p1A18 | Hexokinase-2 | Hexokinase 2 | 249 | NP_000180 | 250 | NM_000189 |
| p1B14 | Interleukin 8 | Interleukin 8 | 251 | NP_000575 | 252 | NM_000584 |
| p1B15 | Interleukin 8 | Interleukin 8 | 251 | NP_000575 | 252 | NM_000584 |
| p1B16 | Interleukin 8 | Interleukin 8 | 251 | NP_000575 | 252 | NM_000584 |
| p1A11 | GAPDH | Glyceraldehyde-3-phosphate | 253 | NP_002037 | 254 | NM_002046 |
| | | dehydrogenase | | | | |
| p1A12 | GAPDH | Glyceraldehyde-3-phosphate | 253 | NP_002037 | 254 | NM_002046 |
| | | dehydrogenase | | | | |
| p1A13 | Phosphoglycerate kinase 1 | Phosphoglycerate kinase 1 | 255 | NP_000282 | 256 | NM_000291 |
| p1A14 | Enolase 1 | Enolase 1 | 257 | NP_001419 | 258 | NM_001428 |
| p1A19 | Aldolase C | aldolase C, fructose- | 259 | NP_005156 | 260 | NM_005165 |
| | | bisphosphate (ALDOC) | | | | |
| p1A20 | Triosephosphate isomerase 1 | Triosephosphate isomerase 1 | 261 | NP_000356 | 262 | NM_000365 |
| | | (TPI1) | | | | |
| p1A22 | Adenylate kinase 3 | Adenylate kinase 3 (AK3) | 263 | NP_037542 | 264 | NM_013410 |
| p1A23 | Metallothionein 2A | Metallothionein-2a | 265 | NP_005944 | 266 | NM_005953 |
| p1B20 | Osteopontin | Osteopontin | 267 | NP_000573 | 268 | NM_000582 |
| p1B21 | Osteopontin | Osteopontin | 267 | NP_000573 | 268 | NM_000582 |
| p1C17 | Granulin | Granulin | 269 | NP_002078 | 270 | NM_002087 |
| p1C18 | Granulin | Granulin | 269 | NP_002078 | 270 | NM_002087 |
| p1D8 | Hypoxia-inducible protein 2 | Hypoxia-inducible protein 2 | 271 | NP_037464 | 272 | NM_013332 |
| p1A10 | Enolase 2 | Enolase 2, (gamma, neuronal) | 273 | NP_001966 | 274 | NM_001975 |
| p1G24 | Glycogen synthase 1 | Glycogen synthase 1 (muscle) | 275 | NP_002094 | 276 | NM_002103 |
| p1G23 | ALCAM | Activated leucocyte cell | 277 | NP_001618 | 278 | NM_001627 |
| | | adhesion molecule | | | | |
| p1G5 | MAX-interacting protein 1 | MAX-interacting protein 1 | 279 | NP_005953 | 280 | NM_005962 |
| p1G7 | EST | Nuclear receptor co-repressor | 281 | None | 282 | BC008022 |
| p2A23 | Chitinase 3-like 2 | Chitinase 3-like 2 | 283 | NP_003991 | 284 | NM_004000 |
| p1G1 | BACH1 | BACH1 transcription factor | 285 | NP_001177 | 286 | NM_001186 |
| p1G15 | Phosphoglucomutase 1 | Phosphoglucomutase 1 | 287 | NP_002624 | 288 | NM_002633 |
| p1F23 | hypothetical protein LOC51014 | CGI-109 protein | 289 | Q9Y3B3 | 290 | AF151867 |
| p1G8 | Sin3-associated polypeptide | SAP30 | 291 | NP_003855 | 292 | NM_003864 |
| p1G13 | ABCA1 | ATP-binding cassette | 293 | NP_005493 | 294 | NM_005502 |
| | | transporter-1 | | | | |
| p1G10 | SEC24 member A | SEC24 protein | 295 | CAA10334 | 296 | AJ131244 |
| p1F24 | Glia-derived nexin | Trinucleotide repeat containing | 297 | AAA35883 | 298 | M17783 |
| | | 3 | | | | |
| p1G2 | Postsynaptic density-95 | Post-synaptic density protein 95 | 299 | NP_001356 | 300 | NM_001365 |
| p1G11 | Tumor protein D52 | Tumor protein D52 | 301 | NP_005070 | 302 | NM_005079 |
| p1G16 | p27, Kip1 | Cyclin-dependent kinase | 303 | NP_004055 | 304 | NM_004064 |
| | | inhibitor p27kip1 | | | | |
| p1G9 | PI-3-kinase, catalytic, beta | phosphoinositide-3-kinase, | 305 | NP_006210 | 306 | NM_006219 |
| | polypeptide | catalytic, beta | | | | |
| p1G4 | SLC5A3 | Solute carrier family 5, member | 307 | AAC39548 | 308 | AF027153 |
| | | 3 | | | | |
| p1G14 | Cytohesin binding protein | PSCDBP | 309 | NP_004279 | 310 | NM_004288 |
| p1A5 | SLC2A5 | Solute carrier family 2, member | 311 | NP_003030 | 312 | NM_003039 |
| | | 5 | | | | |
| p1A6 | SLC2A5 | Solute carrier family 2, member | 311 | NP_003030 | 312 | NM_003039 |
| | | 5 | | | | |
| p1B6 | Adipophilin | Adipophilin | 313 | NP_001113 | 314 | NM_001122 |
| p1B7 | Adipophilin | Adipophilin | 313 | NP_001113 | 314 | NM_001122 |
| p1B8 | Adipophilin | Adipophilin | 313 | NP_001113 | 314 | NM_001122 |
| p1B9 | Adipophilin | Adipophilin | 313 | NP_001113 | 314 | NM_001122 |
| p1G17 | Early development regulator 2 | Early development regulator 2 | 315 | NP_004418 | 316 | NM_004427 |
| p1G3 | B-cell translocation gene 1 | B-cell translocation gene 1, | 317 | NP_001722 | 318 | NM_001731 |
| p1F22 | Sorting nexin 9 | SH3PX1 | 319 | NP_057308 | 320 | NM_016224 |
| p1G12 | Cyclin G2 | Cyclin G2 | 321 | NP_004345 | 322 | NM_004354 |
| p1F11 | hypothetical protein LOC51754 | NAG-5 protein | 323 | XP_049657 | 324 | AL137430 |
| p1F16 | CYP1B1 | Cytochrome P450 IB1 (dioxin- | 325 | NP_000095 | 326 | NM_000104 |
| | | inducible) | | | | |
| p1F14 | Butyrate response factor 1 | Butyrate response factor 1 | 327 | NP_004917 | 328 | NM_004926 |
| p1F17 | P8 protein (candidate of | p8 protein (candidate of | 329 | NP_036517 | 330 | NM_012385 |
| | metastasis 1) | metastasis 1) | | | | |
| p1C1 | CXCR4 | chemokine (C-X-C motif), | 331 | NP_003458 | 332 | NM_003467 |
| | | receptor 4 (CXCR4) | | | | |
| p1C2 | CXCR4 | chemokine (C-X-C motif), | 331 | NP_003458 | 332 | NM_003467 |
| | | receptor 4 (CXCR4) | | | | |
| p1F3 | hypothetical protein XP_017131 | solute carrier family 16, | 333 | XP_017131 | 334 | XM_017131 |
| | | member 6 | | | | |
| p1F20 | Proline-rich protein with nuclear | Proline-rich protein with nuclear | 335 | NP_006804 | 336 | NM_006813 |
| | targeting signal | targeting signal (B4-2) | | | | |
| p1F6 | hypothetical protein hqp0376 | RNA helicase-related protein | 337 | T08745 | 338 | AF078844 |
| p1F4 | CYP1 | Cytochrome P450, subfamily | 339 | NP_000776 | 340 | NM_000785 |
| | | XXVIIB, polypeptide 1 | | | | |
| p1F15 | SHB adaptor protein | SHB adaptor protein | 341 | NP_003019 | 342 | NM_003028 |
| p1F13 | Papillomavirus regulatory factor | Papillomavirus regulatory factor | 343 | NP_061130 | 344 | AK023418 |
| | PRF-1 | (PRF-1) | | | | |
| p1A7 | SLC31A2 | SLC31A2/hCTR1 | 345 | NP_001851 | 346 | NM_001860 |
| p1A21 | UDP-glucose pyrophosphorylase | UDP-glucose | 347 | NP_006750 | 348 | NM_006759 |
| | 2 | pyrophosphorylase 2 (UGP2) | | | | |
| p1B4 | Proline 4-hydroxylase, alpha | Proline 4-hydroxylase, alpha | 349 | NP_004190 | 350 | NM_004199 |
| | polypeptide II | polypeptide II | | | | |
| p1B5 | Proline 4-hydroxylase, alpha | | 349 | NP_004190 | 350 | NM_004199 |
| | polypeptide II | | | | | |
| p1B10 | Stearoyl-CoA desaturase | Stearoyl-CoA desaturase | 351 | NP_005054 | 352 | NM_005063 |
| p1B11 | Stearoyl-CoA desaturase | Stearoyl-CoA desaturase | 351 | NP_005054 | 352 | NM_005063 |
| p1B12 | Stearoyl-CoA desaturase | Stearoyl-CoA desaturase | 351 | NP_005054 | 352 | NM_005063 |
| p1B13 | Diacylglycerol kinase, zeta | Diacylglycerol kinase, zeta | 353 | NP_003637 | 354 | NM_003646 |
| p1B22 | Protease, Serine, 11 | Serine protease 11 | 355 | NP_002766 | 356 | NM_002775 |
| p1B23 | Interleukin 1 receptor antagonist | IL-1 receptor antagonist, | 357 | NP_000568 | 358 | NM_000577 |
| | | alternatively spliced forms | | | | |
| p1B24 | NS1-binding protein | NS1-binding protein | 359 | NP_006460 | 360 | NM_006469 |
| p1C3 | Activin A receptor, type I | Activin A receptor type I | 361 | NP_001096 | 362 | NM_001105 |
| p1C4 | FGF receptor activating protein 1 | FGF receptor activating protein | 363 | NP_055304 | 364 | NM_014489 |
| | | 1 (FRAG1) | | | | |
| p1C5 | Galectin 8 | Galectin-8 | 365 | NP_006490 | 366 | NM_006499 |
| p1C6 | Glucose phosphate isomerase | Glucose 6-phosphate isomerase | 367 | NP_000166 | 368 | NM_000175 |
| p1C7 | D123 | D123 protein | 369 | NP_006014 | 370 | NM_006023 |
| p1C8 | DEC-1 | Dec1. | 371 | NP_003661 | 372 | NM_003670 |
| p1C9 | RAB-8b protein | Rab-8b | 373 | NP_057614 | 374 | NM_016530 |
| p1C10 | Regulator of G-protein signalling | BL34 | 375 | NP_002913 | 376 | NM_002922 |
| | 1 | | | | | |
| p1C11 | Polyubiquitin | Polyubiquitin UbC | 377 | BAA23632 | 378 | AB009010 |
| p1C12 | Integrin, alpha 5 | Integrin alpha 5 | 379 | NP_002196 | 380 | NM_002205 |
| p1C13 | Jk-recombination signal binding | Jk-recombination signal binding | 381 | AAA60258 | 382 | L07872 |
| | protein | protein | | | | |
| p1C14 | Abstrakt | DEAD-box protein abstrakt | 383 | NP_057306 | 384 | NM_016222 |
| p1C15 | High-mobility group protein 2 | High mobility group 2 protein | 385 | NP_002120 | 386 | NM_002129 |
| p1C16 | Decidual protein induced by | Decidual protein induced by | 387 | NP_008952 | 388 | NM_007021 |
| | progesterone | progesterone | | | | |
| p1C19 | GM2 ganglioside activator protein | GM2 ganglioside activator | 389 | NP_000396 | 390 | NM_000405 |
| | | protein. | | | | |
| p1C20 | CNOT8 | CCR4 associated factor 1 | 391 | NP_004770 | 392 | NM_004779 |
| | | (CAF1) | | | | |
| | Similar to Nucleoside | Nucleoside phosphorylase | 393 | None | 394 | AA430382 |
| | phosphorylase | | | | | |
| p1P5 | SCYA2 | Monocyte chemotactic protein 1 | 395 | NP_002973 | 396 | NM_002982 |
| p2L23 | Endothelin 1 | Endothelin 1 | 397 | NP_001946 | 398 | NM_001955 |
| | Similar to Heat shock 70 kD | Heat shock 70 kD protein 4 | 399 | None | 400 | AA633656 |
| | protein 4 | | | | | |
| p1K9 | Lipocortin I | Annexin AI | 401 | NP_000691 | 402 | NM_000700 |
| p1K23 | MYC | p67 myc protein | 403 | NP_002458 | 404 | NM_002467 |
| p1K15 | Alpha-2-macroglobulin | Alpha-2-macroglobulin | 405 | NP_000005 | 406 | NM_000014 |
| p1K8 | SCYA4 | Macrophage inflammatory | 407 | XP_008449 | 408 | XM_008449 |
| | | protein 1b | | | | |
| p1M24 | Sex hormone-binding globulin | Sex hormone-binding globulin | 409 | NP_001031 | 410 | NM_001040 |
| p1K7 | ATP-binding cassette E1 | ATP-binding cassette, sub- | 411 | NP_002931 | 412 | NM_002940 |
| | | family E (OABP), member 1 | | | | |
| p1K16 | CCT6A | Chaperonin/Tcp zeta 1 | 413 | NP_001753 | 414 | NM_001762 |
| p1K18 | Colony-stimulating factor1 | Colony stimulating factor 1 | 415 | AAA52117 | 416 | M37435 |
| | | (macrophage) | | | | |
| p1N1 | GA17 | Dendritic cell protein (GA17) | 417 | NP_006351 | 418 | NM_006360 |
| p1K22 | GPR44 | G protein-coupled receptor 44 | 419 | NP_004769 | 420 | NM_004778 |
| p1K14 | Keratin 6B | Keratin 6A | 421 | NP_005546 | 422 | NM_005555 |
| p1K13 | Lymphocyte adaptor protein | lymphocyte adaptor protein | 423 | NP_005466 | 424 | NM_005475 |
| p1J20 | Neuro-oncological ventral antigen | Neuro-oncological ventral | 425 | NP_002506 | 426 | NM_002515 |
| | 1 | antigen 1 | | | | |
| p1J22 | Neutral sphingomyelinase (N- | N-SMase/FAN | 427 | NP_003571 | 428 | NM_003580 |
| | SMase) activation associated | | | | | |
| | factor | | | | | |
| p1K1 | Cyclophilin F | Peptidylprolyl isomerase F | 429 | NP_005720 | 430 | NM_005729 |
| | | (cyclophilin F) | | | | |
| p1K3 | Pleckstrin | PLECKSTRIN | 431 | NP_002655 | 432 | NM_002664 |
| p1J19 | CFFM4 | High affinity immunoglobulin | 433 | NP_067024 | 434 | NM_021201 |
| | | epsilon receptor beta | | | | |
| p1K2 | CFFM4 | High affinity immunoglobulin | 433 | NP_067024 | 434 | NM_021201 |
| | | epsilon receptor beta | | | | |
| p1K5 | Ribosomal protein L36a | Ribosomal protein L44 | 435 | NP_000992 | 436 | NM_001001 |
| p1J17 | SLC6A1 | Solute carrier family 6 No 1 | 437 | NP_003033 | 438 | NM_003042 |
| p1J18 | Synaptopodin | Synaptopodin | 439 | NP_009217 | 440 | NM_007286 |
| p1J15 | TERA protein | TERA protein | 441 | NP_067061 | 442 | NM_021238 |
| p1K4 | TSC-22 | TGF beta-stimulated protein | 443 | NP_006013 | 444 | NM_006022 |
| | | TSC-22 | | | | |
| p2A14 | EST | Tubulin, beta, 2 | 445 | None | 446 | AA988110 |
| p1J23 | Calgranulin A | Calgranulin A | 447 | NP_002955 | 448 | NM_002964 |
| p1J21 | Replication factor C large subunit | Replication factor C (145 KDa) | 449 | NP_002904 | 450 | NM_002913 |
| p1J24 | Signal recognition particle 19 kD | Signal recognition particle 19 | 451 | NP_003126 | 452 | NM_003135 |
| | | kD protein | | | | |
| p1J16 | cDNA: FLJ23019 fis, clone | Transcription factor SUPT3H | 453 | None | 454 | AK026672 |
| | LNG00916 | | | | | |
| p1J2 | Proteasome subunit, alpha type, 4 | Proteasome component C9 | 455 | NP_002780 | 456 | NM_002789 |
| p1J9 | MAFB | Maf-related leucine zipper | 457 | NP_005452 | 458 | NM_005461 |
| | | homolog | | | | |
| p1J10 | DNCLI2 | dynein, cytoplasmic, light | 459 | NP_006132 | 460 | NM_006141 |
| | | intermediate polypeptide 2 | | | | |
| p1J1 | Chromobox homolog 3 | Heterochromatin-like protein 1 | 461 | NP_057671 | 462 | NM_016587 |
| p1J5 | SCYA7 | Monocyte chemotactic protein 3 | 463 | NP_006264 | 464 | NM_006273 |
| p1J11 | Fatty-acid-Coenzyme A ligase, | Fatty-acid-Coenzyme A ligase, | 465 | NP_066945 | 466 | NM_021122 |
| | long-chain 2 | long-chain 2 | | | | |
| p1J8 | Programmed cell death 5 | Programmed cell death 5/ | 467 | NP_004699 | 468 | NM_004708 |
| | | TFAR19 | | | | |
| p1I20 | SCYA3L | Small inducible cytokine A3 | 469 | CAA36397 | 470 | X52149 |
| p1J3 | Furin | Cytochrome c oxidase subunit | 471 | NP_002560 | 472 | NM_002569 |
| | | VIc | | | | |
| p1J12 | Nuclear autoantigenic sperm | NASP histone-binding prot. | 473 | NP_002473 | 474 | NM_002482 |
| | protein | | | | | |
| p1I23 | Ecotropic viral integration site 2A | Ecotropic viral integration site | 475 | NP_055025 | 476 | NM_014210 |
| | | 2A | | | | |
| p1J7 | Sjogren syndrome antigen B | Sjogren syndrome antigen B | 477 | NP_003133 | 478 | NM_003142 |
| p1I21 | SCYA8 | Monocyte chemotactic protein 2 | 479 | NP_005614 | 480 | NM_005623 |
| p1I19 | GRO2 | GRO2/macrophage | 481 | NP_002080 | 482 | NM_002089 |
| | | inflammatory protein 2a | | | | |
| p1J4 | Small nuclear ribonucleoprotein | Small nuclear ribonucleoprotein | 483 | NP_008869 | 484 | NM_006938 |
| | D1 | SM D 1 | | | | |
| p1I24 | GRO1 | GRO1/macrophage | 485 | NP_001502 | 486 | NM_001511 |
| | | inflammatory protein 2 | | | | |
| | | precursor | | | | |
| p1I18 | Selectin L | Lymphocyte adhesion molecule | 487 | NP_000646 | 488 | NM_000655 |
| | | 1 | | | | |

1. A method for the identification of a gene that is implicated in a specific disease or physiological condition, said method comprising the steps of:
a) comparing:
i) the transcriptome or proteome of a first specialized cell type that is implicated in the disease or condition under first and second experimental conditions; with
ii) the transcriptome or proteome of a second specialized cell type under said first and said second experimental conditions; and
b) identifying as a gene implicated in the disease or physiological condition, a gene that is differentially regulated in the two specialized cell types under the first and second experimental conditions.

2. A method according to claim 1, wherein said specialized cell types are selected from the group consisting of cardiomyocytes, endothelial cells, sensory neurons, motor neurons, CNS neurons, astrocytes, glial cells, schwann cells, mast cells, eosinophils, smooth muscle cells, skeletal muscle cells, pericytes, lymphocytes, tumor cells, monocytes, macrophages, foamy macrophages, granulocytes, synovial cells/synovial fibroblasts and epithelial cells.

3. A method according to claim 1, wherein said first and second experimental conditions differ in respect of the cellular microenvironment, or in respect of exposure to hormones, growth factors, cytokines, chemokines, inflammatory agents, toxins, metabolites, pH, pharmaceutical agents, hypoxia, anoxia, ischemia, imbalance of any plasma-borne nutrient, osmotic stress, temperature, mechanical stress, irradiation, cell-extracellular matrix interactions, cell-cell interactions, accumulations of foreign or pathological extracellular components, intracellular and extracellular pathogens, or a genetic perturbation.

4. A method according to claim 1, wherein the first experimental conditions and second experimental conditions differ in that under the second experimental conditions, the cells are exposed to a physiological stimulus.

5. A method according to claim 4, wherein the physiological stimulus is a physiological, mechanical, temperature, chemical, toxic or pharmaceutical stress.

6. A method according to claim 5, wherein said physiological stress is hypoxia.

7. A method according to claim 1, wherein said first and second experimental conditions are different genetic conditions.

8. A method according to claim 7, wherein said second experimental conditions differ from said first experimental conditions in that the expression of a genetic element is expressed at a different level in said second experimental conditions relative to the level of expression of the genetic element in said first experimental conditions.

9. A method according to claim 8, wherein said genetic element is heterologous to the specialized cell type.

10. A method according to claim 1, wherein the transcriptomes of the specialized cell types are compared by a technique involving hybridization to a nucleic acid array, subtractive mRNA hybridization, the serial analysis of gene expression (SAGE); the selective amplification via biotin- and restriction-mediated enrichment (SABRE); differential display; representational difference analysis (RDA); differential screening of cDNA libraries; Northern blotting; an RNAse protection assay; an S1-nuclease protection assays; RT-PCR; real time RT-PCR (Taq-man); EST sequencing; massively parallel signature sequencing (MPSS); or sequencing by hybridization (SBH).

11. A method according to claim 10, wherein the transcriptomes are compared by hybridization to a nucleic acid array.

12. A substantially purified polypeptide, encoded by a gene implicated in a specific disease or physiological condition by a method according to claim 1.

13. A substantially purified polypeptide, which polypeptide:
i) comprises the amino acid sequence as recited in any one of SEQ ID NOS: 1, 3, 5, 7, 9, 11, 13, 15, 17, 19, 21, 23, 25, 27, 29, 31, 33, 35, 37, 39, 41, 43, 45, 47, 49, 51, 53, 55, 57, 59, 63, 67, 69, 73, 75, 77, 85, 85a, 87, 89, 91, 93, 95, 99, 103, 113, 115, 119, 121, 129, 131, 133, 137, 139, 141, 145, 151, 153, 157, 159, 163, 169, 181, 187, 201, 205, 207, 209, 527, 529 and 531;
ii) has an amino acid sequence encoded by a nucleic acid sequence recited in any one of SEQ ID NOS: 2, 4, 6, 8, 10, 12, 14, 16, 18, 20, 22, 24, 26, 28, 30, 32, 34, 36, 38, 40, 42, 44, 46, 48, 50, 52, 54, 56, 58, 60, 62, 64, 66, 68, 70, 72, 74, 76, 78, 80, 82, 84, 86, 86a, 88, 90, 90a, 92, 92a, 94, 96, 98, 100, 102, 104, 106, 108, 110, 112, 114, 116, 118, 120, 122, 124, 126, 128, 130, 132, 134, 136, 138, 140, 142, 144, 146, 148, 150, 152, 154, 156, 158, 160, 162, 164, 166, 168, 170, 172, 174, 176, 178, 180, 182, 184, 186, 188, 190, 192, 194, 196, 198, 200, 202, 204, 206, 208, 210, 212, 214, 216, 528, 530 and 532, or has an amino acid sequence encoded by a gene identified from an EST recited in any one of these SEQ ID NOS;
iii) is a fragment of a polypeptide according to i) or ii), provided that said fragment retains a biological activity possessed by the full length polypeptide of i) or ii), or has an antigenic determinant in common with the polypeptide of i) or ii); or
iv) is a functional equivalent of a polypeptide of i), ii) or (iii).

14. A polypeptide according to claim 13, wherein said biological activity is a hypoxia-regulated activity.

15. A polypeptide according to claim 14, wherein the expression of the polypeptide is hypoxia-induced.

16. A polypeptide according to claim 15, which polypeptide:
i) comprises the amino acid sequence as recited in any one of SEQ ID NOS: 1, 3, 5, 7, 9, 11, 13, 15, 17, 19, 21, 23, 25, 27, 29, 31, 33, 63, 67, 69, 73, 75, 77, 85, 85a, 87, 89, 91, 93, 95, 99, 103, 113, 115, 119, 121, 129, 131, 133, 137, 139, 141, 527, 529 and 531;
ii) has an amino acid sequence encoded by a nucleic acid sequence recited in any one of SEQ ID NOS: 2, 4, 6, 8, 10, 12, 14, 16, 18, 20, 22, 24, 26, 28, 30, 32, 34, 64, 66, 68, 70, 72, 74, 76, 78, 80, 82, 84, 86, 86a, 88, 90, 90a, 92, 92a, 94, 96, 98, 100, 102, 104, 106, 108, 110, 112, 114, 116, 118, 120, 122, 124, 126, 128, 130, 132, 134, 136, 138, 140, 142, 144, 528, 530 and 532, or is encoded by a gene identified from an EST recited in any one of these SEQ ID NOS;
iii) is a fragment of a polypeptide according to i) or ii), provided that said fragment retains a biological activity possessed by the full length polypeptide of i) or ii), or has an antigenic determinant in common with the polypeptide of i) or ii); or
iv) is a functional equivalent of a polypeptide of i), ii) or (iii).

17. A polypeptide according to claim 14, wherein the expression of the polypeptide is hypoxia-repressed.

18. A polypeptide according to claim 17, which polypeptide:
i) comprises the amino acid sequence as recited in any one of SEQ ID NOS: 35, 37, 39, 41, 43, 45, 47, 49, 51, 53, 55, 57, 59, 145, 151, 153, 157, 159, 163, 169, 181, 187, 201, 205, 207 and 209;
ii) has an amino acid sequence encoded by a nucleic acid sequence recited in any one of SEQ ID NOS: 36, 38, 40, 42, 44, 46, 48, 50, 52, 54, 56, 58, 60, 146, 148, 150, 152, 154, 156, 158, 160, 162, 164, 166, 168, 170, 172, 174, 176, 178, 180, 182, 184, 186, 188, 190, 192, 194, 196, 198, 200, 202, 204, 206, 208, 210, 212, 214 and 216, or is encoded by a gene identified from an EST recited in any one of these SEQ ID NOS;
iii) is a fragment of a polypeptide according to i) or ii), provided that said fragment retains a biological activity possessed by the full length polypeptide of i) or ii), or has an antigenic determinant in common with the polypeptide of i) or ii); or
iv) is a functional equivalent of a polypeptide of i), ii) or (iii).

19. The polypeptide of claim 13, wherein the functional equivalent according to part iv) is homologous to the amino acid sequence as recited in any one of SEQ ID NOS: 1, 3, 5, 7, 9, 11, 13, 15, 17, 19, 21, 23, 25, 27, 29, 31, 33, 35, 37, 39, 41, 43, 45, 47, 49, 51, 53, 55, 57, 59, 63, 67, 69, 73, 75, 77, 85, 85a, 87, 89, 91, 93, 95, 99, 103, 113, 115, 119, 121, 129, 131, 133, 137, 139, 141, 145, 151, 153, 157, 159, 163, 169, 181, 187, 201, 205, 207, 209, 527, 529 and 531 or is homologous to the amino acid sequence encoded by a nucleic acid as recited in any one of SEQ ID NOS: 2, 4, 6, 8, 10, 12, 14, 16, 18, 20, 22, 24, 26, 28, 30, 32, 34, 36, 38, 40, 42, 44, 46, 48, 50, 52, 54, 56, 58, 60, 62, 64, 66, 68, 70, 72, 74, 76, 78, 80, 82, 84, 86, 86a, 88, 90, 90a, 92, 92a, 94, 96, 98, 100, 102, 104, 106, 108, 110, 112, 114, 116, 118, 120, 122, 124, 126, 128, 130, 132, 134, 136, 138, 140, 142, 144, 146, 148, 150, 152, 154, 156, 158, 160, 162, 164, 166, 168, 170, 172, 174, 176, 178, 180, 182, 184, 186, 188, 190, 192, 194, 196, 198, 200, 202, 204, 206, 208, 210, 212, 214, 216, 528, 530 and 532, and has equivalent biological activity to that possessed by the full length polypeptide of i) or ii).

20. The polypeptide of claim 13, wherein the fragment of part (iii) has greater than 50% sequence identity with the amino acid sequence as recited in any one of SEQ ID NOS: 1, 3, 5, 7, 9, 11, 13, 15, 17, 19, 21, 23, 25, 27, 29, 31, 33, 35, 37, 39, 41, 43, 45, 47, 49, 51, 53, 55, 57, 59, 63, 67, 69, 73, 75, 77, 85, 85a, 87, 89, 91, 93, 95, 99, 103, 113, 115, 119, 121, 129, 131, 133, 137, 139, 141, 145, 151, 153, 157, 159, 163, 169, 181, 187, 201, 205, 207, 209, 527, 529 and 531 or with the amino acid sequence that is encoded by a nucleic acid as recited in any one of SEQ ID NOS: 2, 4, 6, 8, 10, 12, 14, 16, 18, 20, 22, 24, 26, 28, 30, 32, 34, 36, 38, 40, 42, 44, 46, 48, 50, 52, 54, 56, 58, 60, 62, 64, 66, 68, 70, 72, 74, 76, 78, 80, 82, 84, 86, 86a, 88, 90, 90a, 92, 92a, 94, 96, 98, 100, 102, 104, 106, 108, 110, 112, 114, 116, 118, 120, 122, 124, 126, 128, 130, 132, 134, 136, 138, 140, 142, 144, 146, 148, 150, 152, 154, 156, 158, 160, 162, 164, 166, 168, 170, 172, 174, 176, 178, 180, 182, 184, 186, 188, 190, 192, 194, 196, 198, 200, 202, 204, 206, 208, 210, 212, 214, 216, 528, 530 and 532, or with fragments thereof, preferably greater than 60%, 70%, 80%, 90%, 95%, 98% or 99% sequence identity.

21. The polypeptide of claim 13, wherein the fragment of part (iii) has an antigenic determinant in common with a polypeptide according to part i), which consists of 7 or more amino acid residues from the amino acid sequence as recited in any one of SEQ ID NOS: 1, 3, 5, 7, 9, 11, 13, 15, 17, 19, 21, 23, 25, 27, 29, 31, 33, 35, 37, 39, 41, 43, 45, 47, 49, 51, 53, 55, 57, 59, 63, 67, 69, 73, 75, 77, 85, 85a, 87, 89, 91, 93, 95, 99, 103, 113, 115, 119, 121, 129, 131, 133, 137, 139, 141, 145, 151, 153, 157, 159, 163, 169, 181, 187, 201, 205, 207, 209, 527, 529 and 531 or the amino acid sequence encoded by a nucleic acid as recited in any one of SEQ ID NOS: 2, 4, 6, 8, 10, 12, 14, 16, 18, 20, 22, 24, 26, 28, 30, 32, 34, 36, 38, 40, 42, 44, 46, 48, 50, 52, 54, 56, 58, 60, 62, 64, 66, 68, 70, 72, 74, 76, 78, 80, 82, 84, 86, 86a, 88, 90, 90a, 92, 92a, 94, 96, 98, 100, 102, 104, 106, 108, 110, 112, 114, 116, 118, 120, 122, 124, 126, 128, 130, 132, 134, 136, 138, 140, 142, 144, 146, 148, 150, 152, 154, 156, 158, 160, 162, 164, 166, 168, 170, 172, 174, 176, 178, 180, 182, 184, 186, 188, 190, 192, 194, 196, 198, 200, 202, 204, 206, 208, 210, 212, 214, 216, 528, 530 and 532.

22. A purified and isolated nucleic acid molecule that encodes a polypeptide according to claim 13.

23. A purified nucleic acid molecule according to claim 22, which consists of the nucleic acid sequence as recited in any one of SEQ ID NOS: 2, 4, 6, 8, 10, 12, 14, 16, 18, 20, 22, 24, 26, 28, 30, 32, 34, 36, 38, 40, 42, 44, 46, 48, 50, 52, 54, 56, 58, 60, 62, 64, 66, 68, 70, 72, 74, 76, 78, 80, 82, 84, 86, 86a, 88, 90, 90a, 92, 92a, 94, 96, 98, 100, 102, 104, 106, 108, 110, 112, 114, 116, 118, 120, 122, 124, 126, 128, 130, 132, 134, 136, 138, 140, 142, 144, 146, 148, 150, 152, 154, 156, 158, 160, 162, 164, 166, 168, 170, 172, 174, 176, 178, 180, 182, 184, 186, 188, 190, 192, 194, 196, 198, 200, 202, 204, 206, 208, 210, 212, 214, 216, 528, 530 and 532, or is a redundant equivalent or fragment thereof.

24. A purified nucleic acid molecule which hydridizes under high stringency conditions with a nucleic acid molecule according to claim 22.

25. A vector comprising a nucleic acid molecule as recited in claim 22.

26. A delivery vehicle comprising a nucleic acid according to claim 22.

27. A host cell transformed with a vector according to claim 25.

28. An antagonist ligand which binds specifically to a polypeptide according to claim 13, wherein the ligand optionally inhibits the hypoxia-induced activity of said polypeptide.

29. An agonist ligand which binds specifically to a polypeptide according to claim 13, preferably a ligand which augments or potentiates a hypoxia-induced activity of said polypeptide.

30. A ligand according to claim 28, which is an antibody.

31. A ligand according to claim 28, which is a peptide, a peptidomimetic, or a drug molecule, a small natural or synthetic organic molecule of up to 2000 Da, or a small natural or synthetic organic molecule of 800 Da or less.

32. A method for treating or diagnosing a disease, which comprises administering a polypeptide according to claim 13, a nucleic acid molecule according to claim 22, a vector according to claim 25 or a ligand according to claim 30 to a subject.

33. The method of claim 32, wherein said disease is a hypoxia-regulated condition.

34. The method of claim 33, wherein said hypoxia-regulated condition is tumourigenesis, angiogenesis, apoptosis, inflammation, erythropoiesis, or a biological response to hypoxia conditions selected from the group consisting of glycolysis, gluconeogenesis, glucose transportation, catecholamine synthesis, iron transport, and nitric oxide synthesis.

35. A substantially purified polypeptide, which polypeptide:
i) comprises the amino acid sequence as recited in any one of SEQ ID NOS: 1, 3, 5, 7, 9, 11, 13, 15, 17, 19, 21, 23, 25, 27, 29, 31, 33, 35, 37, 39, 41, 43, 45, 47, 49, 51, 53, 55, 57, 59, 63, 67, 69, 73, 75, 77, 85, 85a, 87, 89, 91, 93, 95, 99, 103, 113, 115, 119, 121, 129, 131, 133, 137, 139, 141, 145, 151, 153, 157, 159, 163, 169, 181, 187, 201, 205, 207, 209, 527, 529 and 531 or SEQ ID NOS: 217, 219, 221, 223, 225, 227, 229, 231, 233, 235, 237, 239, 241, 243, 245, 247, 249, 251, 253, 255, 257, 259, 261, 263, 265, 267, 269, 271, 273, 275, 277, 279, 281, 283, 285, 287, 289, 291, 293, 295, 297, 299, 301, 303, 305, 307, 309, 311, 313, 315, 317, 319, 321, 323, 325, 327, 329, 331, 333, 335, 337, 339, 341, 343, 345, 347, 349, 351, 353, 355, 357, 359, 361, 363, 365, 367, 369, 371, 373, 375, 377, 379, 381, 383, 385, 387, 389, 391, 393, 395, 397, 399, 401, 403, 405, 407, 409, 411, 413, 415, 417, 419, 421, 423, 425, 427, 429, 431, 433, 435, 437, 439, 441, 443, 445, 447, 449, 451, 453, 455, 457, 459, 461, 463, 465, 467, 469, 471, 473, 475, 477, 479, 481, 483, 485 and 487;
ii) has an amino acid sequence encoded by a nucleic acid sequence recited in any one of SEQ ID NOS: 2, 4, 6, 8, 10, 12, 14, 16, 18, 20, 22, 24, 26, 28, 30, 32, 34, 36, 38, 40, 42, 44, 46, 48, 50, 52, 54, 56, 58, 60, 62, 64, 66, 68, 70, 72, 74, 76, 78, 80, 82, 84, 86, 86a, 88, 90, 90a, 92, 92a, 94, 96, 98, 100, 102, 104, 106, 108, 110, 112, 114, 116, 118, 120, 122, 124, 126, 128, 130, 132, 134, 136, 138, 140, 142, 144, 146, 148, 150, 152, 154, 156, 158, 160, 162, 164, 166, 168, 170, 172, 174, 176, 178, 180, 182, 184, 186, 188, 190, 192, 194, 196, 198, 200, 202, 204, 206, 208, 210, 212, 214, 216, 528, 530 and 532, or has an amino acid sequence encoded by a gene identified from an EST recited in any one of these SEQ ID NOS;
iii) is a fragment of a polypeptide according to i) or ii), provided that said fragment retains a biological activity possessed by the full length polypeptide of i) or ii), or has an antigenic determinant in common with the polypeptide of i) or ii); or
iv) is a functional equivalent of a polypeptide of i), ii) or (iii).
for use in the diagnosis or therapy of the disease or abnormal physiological condition that is affected by hypoxia, wherein said disease or abnormal physiological condition that is treated by hypoxia is selected from the group consisting of cancer, ischaemic conditions, reperfusion injury, retinopathy, neonatal stress, preeclapmsia, atherosclerosis, inflammatory conditions, wound healing, tumourigenesis, angiogenesis, apoptosis, inflammation, erythropoiesis, hair loss, or the biological response to hypoxia conditions, including processes such as glycolysis, gluconeogenesis, glucose transportation, catecholamine synthesis, iron transport and nitric oxide synthesis.

36. A purified and isolated nucleic acid molecule that encodes a polypeptide as recited in claim 35, for use in the diagnosis or therapy of for use in the diagnosis or therapy of a disease or abnormal physiological condition that is affected by hypoxia, wherein said disease or abnormal physiological condition that is affected by hypoxia is selected from the group consisting of cancer, ischaemic conditions, reperfusion injury, retinopathy, neonatal stress, preeclapmsia, atherosclerosis, inflammatory conditions, wound healing, tumourigenesis, angiogenesis, apoptosis, inflammation, erythropoiesis, and hair loss.

37. A purified nucleic acid molecule as recited in claim 36, which consists of the nucleic acid sequence as recited in any one of SEQ ID NOS: 218, 220, 222, 224, 226, 228, 230, 232, 234, 236, 238, 240, 242, 244, 246, 248, 250, 252, 254, 256, 258, 260, 262, 264, 266, 268, 270, 272, 274, 276, 278, 280, 282, 284, 286, 288, 290, 292, 294, 296, 298, 300, 302, 304, 306, 308, 310, 312, 314, 316, 318, 320, 322, 324, 326, 328, 330, 332, 334, 336, 338, 340, 342, 344, 346, 348, 350, 352, 354, 356, 358, 360, 362, 364, 366, 368, 370, 372, 374, 376, 378, 380, 382, 384, 386, 388, 390, 392, 394, 396, 398, 400, 402, 404, 406, 408, 410, 412, 414, 416, 418, 420, 422, 424, 426, 428, 430, 432, 434, 436, 438, 440, 442, 444, 446, 448, 450, 452, 454, 456, 458, 460, 462, 464, 466, 468, 470, 472, 474, 476, 478, 480, 482, 484, 486 and 488, or which is a redundant equivalent or fragment thereof, for use in the diagnosis or therapy of a disease or abnormal physiological condition that is affected by hypoxia, wherein said disease or abnormal physiological condition that is affected by hypoxia is selected from the group consisting of cancer, ischaemic conditions, reperfusion injury, retinopathy, neonatal stress, preeclapmsia, atherosclerosis, inflammatory conditions, wound healing, tumourigenesis, angiogenesis, apoptosis, inflammation, erythropoiesis, and hair loss.

38. A purified nucleic acid molecule which hydridizes under high stringency conditions with a nucleic acid molecule as recited in claim 36, for use in the diagnosis or therapy of a disease or abnormal physiological condition that is affected by hypoxia, wherein said disease or abnormal physiological condition that is affected by hypoxia is selected from the group consisting of cancer, ischaemic conditions, reperfusion injury, retinopathy, neonatal stress, preeclapmsia, atherosclerosis, inflammatory conditions, wound healing, tumourigenesis, angiogenesis, apoptosis, inflammation, erythropoiesis, and hair loss.

39. A vector comprising a nucleic acid molecule as recited in claim 36, for use in the diagnosis or therapy of a disease or abnormal physiological condition that is affected by hypoxia, wherein said disease or abnormal physiological condition that is affected by hypoxia is selected from the group consisting of cancer, ischaemic conditions, reperfusion injury, retinopathy, neonatal stress, preeclapmsia, atherosclerosis, inflammatory conditions, wound healing, tumourigenesis, angiogenesis, apoptosis, inflammation, erythropoiesis, and hair loss.

40. A ligand which binds specifically to, and which optionally inhibits the hypoxia-induced activity of, a polypeptide as recited in claim 35, for use in the diagnosis or therapy of tumourigenesis, angiogenesis, apoptosis, the biological response to hypoxia conditions, or a hypoxic-associated pathology.

41. A pharmaceutical composition suitable for modulating hypoxia, ischaemia, or hypoxia and ischaemia, comprising a therapeutically-effective amount of a polypeptide as recited in claim 13, a nucleic acid molecule according to claim 22, a vector according to claim 25, or a ligand according to claim 30, in conjunction with a pharmaceutically-acceptable carrier.

42. A pharmaceutical composition according to claim 41, wherein said pharmaceutically-acceptable carrier is a liposome.

43. A vaccine composition comprising a polypeptide as recited in claim 13, a nucleic acid molecule as recited in claim 22, or a vector according to claim 25.

44. A method of treating a disease in a patient in need of such treatment by administering to a patient a therapeutically effective amount of a polypeptide as recited in claim 13, an antagonist of said polypeptide, or a nucleic acid molecule as recited in claim 22.

45. A method of regulating tumourigenesis, angiogenesis, apoptosis, the biological response to hypoxia conditions, or a hypoxic-associated pathology in a patient in need of such treatment by administering to a patient a therapeutically effective amount of a polypeptide according to claim 13, a nucleic acid molecule according to claim 22, a vector according to claim 25, a ligand according to claim 30.

46. A method according to claim 45, wherein, for diseases in which the expression of the natural gene or the activity of the polypeptide is lower in a diseased patient when compared to the level of expression or activity in a healthy patient, the polypeptide, nucleic acid molecule, ligand, compound or composition administered to the patient is an agonist.

47. A method according to claim 45, wherein, for diseases in which the expression of the natural gene or activity of the polypeptide is higher in a diseased patient when compared to the level of expression or activity in a healthy patient, the polypeptide, nucleic acid molecule, vector, ligand, compound or composition administered to the patient is an antagonist.

48. A method of monitoring the therapeutic treatment of a disease or physiological condition in a patient, comprising monitoring over a period of time the level of expression or activity of polypeptide according to claim 13, or a nucleic acid molecule according to claim 22, in tissue from said patient, wherein altering said level of expression or activity over the period of time towards a control level is indicative of regression of said disease.

49. A method of providing a hypoxia regulating gene, an apoptotic or an angiogenesis regulating gene by administering directly to a patient in need of such therapy an expressible vector comprising expression control sequences operably linked to a nucleic acid molecule recited in claim 22.

50. A method of diagnosing a hypoxia-regulated condition in a patient, comprising assessing the level of expression of a natural gene encoding a polypeptide according to claim 13, or assessing the activity of such a polypeptide, in tissue from said patient and comparing said level of expression or activity to a control level, wherein a level that is different to said control level is indicative of the hypoxia-related condition.

51. A method according to claim 50 that is carried out in vitro.

52. A method according to claim 50, which comprises: (a) contacting a ligand according to claim 30 with a biological sample under conditions suitable for the formation of a ligand-polypeptide complex; and (b) detecting said complex.

53. A method according to claim 50, comprising:
a) contacting a sample of tissue from the patient with a nucleic acid probe under stringent conditions that allow the formation of a hybrid complex between a nucleic acid molecule according to claim 22 and the probe;
b) contacting a control sample with said probe under the same conditions used in step a); and
c) detecting the presence of hybrid complexes in said samples;
whereby detection of levels of the hybrid complex in the patient sample that differ from levels of the hybrid complex in the control sample is indicative of the hypoxia-related condition.

54. A method according to claim 50, comprising:
a) contacting a sample of nucleic acid from the tissue of the patient with a nucleic acid primer under stringent conditions that allows the formation of a hybrid complex between a nucleic acid molecule according to claim 22 and the primer;
b) contacting a control sample with said primer under the same conditions used in step a);
c) amplifying the sampled nucleic acid; and
d) detecting the level of amplified nucleic acid from both patient and control samples;
whereby detection of levels of the amplified nucleic acid in the patient sample that differ significantly from levels of the amplified nucleic acid in the control sample is indicative of the hypoxia-related condition.

55. A method according to claim 50, comprising:
a) obtaining a tissue sample from a patient being tested for the hypoxia-related condition;
b) isolating a nucleic acid molecule according to claim 22 from said tissue sample; and
c) diagnosing the patient for disease by detecting the presence of a mutation which is associated with the hypoxia-related condition in the nucleic acid molecule as an indication of the hypoxia-related condition.

56. The method of claim 55, further comprising amplifying the nucleic acid molecule to form an amplified product and detecting the presence or absence of a mutation in the amplified product.

57. A method according to claim 48, wherein said disease is cancer, ischaemic conditions, reperfusion injury, retinopathy, neonatal stress, preeclapmsia, atherosclerosis, inflammatory conditions, wound healing, tumourigenesis, angiogenesis, apoptosis, inflammation, erythropoiesis, or hair loss.

58. A method according to claim 57, wherein said hypoxia or ischaemia-related tissue damage is due to a disorder of the cerebral, coronary or peripheral circulation.

59. A method according to claim 48, wherein the tissue is a cancer tissue.

60. A method for the identification of a compound that is effective in the treatment, diagnosis, or treatment and diagnosis of disease, comprising contacting a polypeptide according to claim 13, or a nucleic acid molecule according to claim 22 with one or more compounds suspected of possessing binding affinity for said polypeptide or nucleic acid molecule, and selecting a compound that binds specifically to said nucleic acid molecule or polypeptide.

61. A method for the identification of a compound that is effective in the treatment, diagnosis, or treatment and diagnosis of disease, comprising contacting a cell or cell membrane preparation comprising a polypeptide according to claim 13, or a nucleic acid molecule according to claim 22 with one or more candidate compounds and detecting the degree of compound binding, or the stimulation or inhibition of a functional response in said cell or cell membrane.

62. A method according to claim 61, wherein said polypeptide comprises the amino acid sequence recited in SEQ ID NO: 85 or 85a, or said nucleic acid molecule comprises the nucleotide sequence recited in SEQ ID NO: 86 or 86a, and the functional response is the degree of prolyl 4-hydroxylase activity evident in said cell or cell membrane.

63. A method according to claim 62, wherein said functional response is the degree of prolyl 4-hydroxylation of HIF-1α in said cell or cell membrane.

64. A method according to claim 61, wherein said polypeptide comprises the amino acid sequence recited in SEQ ID NO:85 or 85a, or said nucleic acid molecule comprises the nucleotide sequence recited in SEQ ID NO: 86 or 86a, and the functional response is the ability of said polypeptide to interact with HIF-1α.

65. A method according to claim 61, wherein said polypeptide comprises the amino acid sequence recited in SEQ ID NO:527, 529 or 531, or said nucleic acid molecule comprises the nucleotide sequence recited in SEQ ID NO: 528, 530 or 532, and the functional response is the degree of PI3-kinase activity evident in said cell or cell membrane.

66. A method according to claim 61, wherein said polypeptide comprises the amino acid sequence recited in SEQ ID NO:527, 529 or 531, or said nucleic acid molecule comprises the nucleotide sequence recited in SEQ ID NO: 528, 530 or 532, and the functional response is the ability of said polypeptide to interact with a tyrosine kinase, the p85 subunit of PI3-kinase in said cell or cell membrane, or a combination thereof.

67. A compound identified or identifiable by a method according to claim 60.

68. A method according to claim 62, wherein said candidate compounds is a natural or modified substrate, an enzyme, a receptor, a small organic molecule, a small natural or synthetic organic molecule of up to 2000 Da, a small natural or synthetic organic molecule of 800 Da or less, a peptidomimetic, an inorganic molecule, a peptide, a polypeptide, an antibody, or a structural or functional mimetic of the forgoing.

69. A kit useful for diagnosing disease comprising a first container comprising a nucleic acid probe that hybridizes under stringent conditions with a nucleic acid molecule according to claim 22; a second container comprising primers useful for amplifying said nucleic acid molecule; and instructions for using the probe and-primers for facilitating the diagnosis of disease.

70. The kit of claim 69, further comprising a third container comprising an agent for digesting unhybridised RNA.

71. An array of at least two nucleic acid molecules, wherein each of said nucleic acid molecules either corresponds to the sequence of, is complementary to the sequence of, or hybridizes specifically to a nucleic acid molecule according to claim 22.

72. An array according to claim 71, which contains nucleic acid molecules that either correspond to the sequence of, are complementary to the sequence of, or hybridise specifically to at least 2, 3, 4, 5, 6, 7, 8, 9, 10, 11, 12, 13, 14, 15, 16, 17, 18, 19, 20, 21, 22, 23, 24, 25, 26, 27, 28, 29, 30, 31, 32, 33, 34, 35, 36, 37, 38, 39, 40, 41, 42, 43, 44, 45, 46, 47, 48, 49, 50, 51, 52, 53, 54, 55, 56, 57, 58, 59, 60, 61, 62, 63, 64, 65, 66, 67, 68, 69, 70, 71, 72, 73, 74, 75, 76, 77, 78, 79, 80, 81, 82, 83, 84, 85, 86, 87, 88, 89, 90, 90a, 91, 92, 92a, 93, 94, 95, 96, 97, 98, 99, 100, 101, 102, 103, 104, 105, 106, 107, 108, 109, 110, 111, 112, 113, 114, 115, 116, 117, 118, 119, 120, 121, 122, 123, 124, 125, 126, 127, 128, 129, 130, 131, 132, 133, 134, 135, 136, 137, 138, 139, 140, 141, 142, 143, 144, 145, 146, 147, 148, 149, 150, 151, 152, 153, 154, 155, 156, 157, 158, 159, 160, 161, 162, 163, 164, 165, 166, 167, 168, 169, 170, 171, 172, 173, 174, 175, 176, 177, 178, 179, 180, 181, 182, 183, 184, 185, 186, 187, 188, 189, 190, 191, 192, 193, 194, 195, 196, 197, 198, 199, 200, 201, 202, 203, 204, 205, 206, 207, 208, 209, 210, 211, 212, 213, 214, 215, 216, 217, 218, 219, 220, 221, 222, 223, 224, 225, 226, 227, 228, 229, 230, 231, 232, 233, 234, 235, 236, 237, 238, 239, 240, 241, 242, 243, 244, 245, 246, 247, 248, 249, 250, 251, 252, 253, 254, 255, 256, 257, 258, 259, 260, 261, 262, 263, 264, 265, 266, 267, 268, 269, 270, 271, 272, 273, 274, 275, 276, 277, 278, 279, 280, 281, 282, 283, 284, 285, 286, 287, 288, 289, 290, 291, 292, 293, 294 or 295 of the nucleic acid molecules implicated in a hypoxia-regulated condition as recited in claim 22.

73. An array according to 71, wherein said nucleic acid molecules consist of between twelve and two thousand nucleotides.

74. An array of antibodies, comprising at least two different antibody species, wherein each antibody species is immunospecific with a polypeptide implicated in a hypoxia-regulated condition as recited in claim 13.

75. An array of polypeptides, comprising at least two polypeptide species as recited in claim 13, wherein each polypeptide species is implicated in a hypoxia-regulated condition, or is a functional equivalent variant or fragment thereof.

76. A kit comprising an array of nucleic acid molecules according to claim 71.

77. A kit comprising one or more antibodies that bind to a polypeptide as recited in claim 13; and a reagent useful for the detection of a binding reaction between said antibody and said polypeptide.

78. A transgenic or knockout non-human animal that has been transformed to express higher, lower or absent levels of a polypeptide according to claim 13.

79. A method for screening for a compound effective to treat disease, by contacting a non-human transgenic animal according to claim 78 with a candidate compound and determining the effect of the compound on the disease or physiological condition of the animal.

80. A protein complex comprising the EGLN3 (BAB15101; SEQ ID NO: 85), the EGLN3 splice variant (SEQ ID NO: 85a), EGLN1 (c1orf12; AAG34568; SEQ ID NO: 89) or CAB81622 polypeptide, complexed with a polypeptide selected from the group consisting of Hif1alpha, Hif2alpha, Hif3alpha, a member of the PAS-domain transcription factor family, p53 and a protein binding partner that is equivalent to the beta subunit of P4H.

81. A protein complex according to claim 80, which is a dimer or tetramer complex.

82. A protein complex comprising a Hu.BCAP-A polypeptide or a functional equivalent thereof, a tyrosine kinase protein, a PI3-kinase protein, or combinations thereof.

83. A substantially purified polypeptide comprising the consensus sequence:
KAMVACYPGNGTGYVRHVDNPNGDGRCITCIYYLNKNWDAKLHGGILRIFPEGKS FIADVEPIFDRLLFFWSDRRNPHEVQPSYATRYAMTVWYFDAEERAEAKKK, or a variant thereof.

84. A substantially purified polypeptide according to claim 80, for use in the diagnosis or treatment of a hypoxia-related disease or condition.

The application's sequence listing, which the Patent Office published only in electronic form, follows.

SEQUENCE LISTING (549 sequences)

SEQ ID NO: 1 - protein, 354 aa, Homo Sapiens
MLTLPQNFGNIFLGETFSSYISVHNDSNQVVKDILVKADLQTSSQRLNLSASNAAVAELKPDCCIDDVIHHEVKEIGTHILVCAVSYTTQAGEKMYFRKFFKFQVLKPLDVKTKFYNAESDLSSVTDEVFLEAQIQNMTTSPMFMEKVSLEPSIMYNVTELNSVSQAGECVSTFGSRAYLQPMDTRQYLYCLKPKNEFAEKAGIIKGVTVIGKLDIVWKTNLGERGRLQTSQLQRMAPGYGDVRLSLEAIPDTVNLEEPFHITCKITNCSERTMDLVLEMCNTNSIHWCGISGRQLGKLHPSSSLCLALTLLSSVQGLQSISGLRLTDTFLKRTYEYDDIAQVCVVSSAIKVES

SEQ ID NO: 2 - DNA, 2726 bp, Homo Sapiens
aaaaagtgccggtcaaaatggaagtgaatccccctaaacaggagcacctgctggcgctaaaagtgatgcggctgactaagcctactttattcaccaatatcccagtaacatgtgaagagaaagacttacctggagatctctttaaccagctgatgagagatgatccttcaaccgttaatggtgcagaagttttaatgttgggataaatgctgactttaccacagaattttgggaatatatttttgggagagaccttttccagttatatcagcgttcataatgatagcaatcaagttgtaaaagacatattagtaaaagctgatcttcagacaagttctcagcgtttaaatctttcagcctccaatgctgcagtggctgaacttaaaccggattgttgtattgatgatgtcatacatcatgaagtcaaagaaattggaacacacatcttggtatgtgctgtgagttatacaactcaggctggagaaaaaatgtatttcagaaaattcttcaaatttcaggttctcaaaccattggatgtgaaaaccaaattttacaatgcagagagtgacctcagttctgtgactgatgaagtatttctggaagcccagattcagaatatgacaacctcacctatgtttatggagaaggtttcactggagccatctattatgtacaatgtaacagaattaaattcagtcagccaagctggagaatgtgtgtctacgtttgggtcaagagcatatttgcaaccaatggatacacgccagtacttatactgcctaaagccaaagaatgaatttgcagaaaaagcaggcatcattaagggagtaacagtaattggaaaattggatatagtatggaaaacaaatctaggtgaaaggggaaggttacagaccagccaacttcaaagaatggctccaggttatggagatgttaggttgtctttggaggcaataccagataccgtaaaccttgaagaaccttttcatattacctgtaaaataacaaactgcagtgaaaggactatggatctggttttggaaatgtgcaataccaattccatccactggtgtggaatttcaggaagacagctgggaaagctgcatccaagttcttcgctctgtcttgcccttactctgctttcttcagtacagggactgcaaagcatctctggcttaagactaacagacacattcttaaagagaacatatgaatatgatgacatcgcacaagtctgtgtggtatcttctgccattaaagtggaaagctgaaggaaacttccaatgttaggcttttcatttagtttcacagaactgctctttttgttacctttgtaaaatgatgacgtcaacaacgaagtaaatatgttacttaaattttctttcctgtaaaatggttaaaatattaaatatttgttttgaagagatctgattttatcttgtaatttatatttgaaatgaacatgtgtatattttctacacctattatttaatttcatttcattttagatgaccattggactttgttctccaaaagctgtgtatctgagaccatttgtccctagcaagttatctagaacacgagtcagcacactttttatgtaaggtacaagatactaaatattttaggctttgcaggccgtaaggtttctgtcacaaatactgaactctgccatcgtacttcaagagcagccagtaggcaaaaaaagtacagtggtgtacacaaaaagaagcagttggactcgggaagctgaggcaggagaatcacttgaaccggggaggcagaggttgcagttaagccgagatcatgctactgcactctagcctgagcgacagagtgagactctgtctcaaaaaaaaaagaggcagctgggcagatttggcctgcagggtatagttggctgacctcaatctagaagatagagttgtttcttagaactttgtaatattttggttagaaatatttcagttaactccagttttttcctagctattcggtcagcagaaaaagtttgcttagaacaaagggggtagtcctcttataacctgatatttgtcaacacagtataagctttctagttgttttcaaaattactgtaatggtttgtgtctgtatttgtatattatacctacaaacatacatatctttcagctactgaacacatcagaattggttttactttttaggttgttgattttttttaattaactattaactaagaataatacttattttctaattataagccaaaaacccctgggtttttttctcattgattaagccacttatttttataaggtatatttaaataattcccatcttctgatatgattttaaactctaaatcatgtgttactgttacaaaactttctctctccatgtaatcacacttagttatgagcaaagcagtgagaaagttgaggtgataaacaactttgcagcattaatgtaacaaaaagtttcagtatttgtcaggaaaacaaaagcttaggctgttaaataaaagctattctattttggtaagttgaaattcaagaatgtatatataatttcttaaatgtaagagtgcattaaatcaaatacaaaaattggtttttcaatgcatcattatttattgccataacaaattgtttggtccaaaatgaaagctatattcagaaggtttgcacctcaaaattgagtaataattaatgaaatgtctgtacaaaataaagtgcaagcagtgt

SEQ ID NO: 3 - protein, 523 aa, Homo Sapiens
MQMRRVWRTCRSGPRKRREARYKKSTEDIFPAQLLKLQRHERVWQQEPPVRDHRSWGGSGAGGVAGREWTDQGQVALGGHYMAEGEGYFAMSEDELACSPYIPLGGDFGGGDFGGGDFGGGDFGGGGSFGGHCLDYCESPTAHCNVLNWEQVQRLDGILSETIPIHGRGNFPTLELQPSLIVKVVRRRLAEKRIGVRDVRLNGSAASHVLHQDSGLGYKDLDLIFCADLRGEGEFQTVKDVVLDCLLDFLPEGVNKEKITPLTLKEAYVQKMVKVCNDSDRWSLISLSNNSGKNVELKFVDSLRRQFEFSVDSFQIKLDSLLLFYECSENPMTETFHPTIIGESVYGDFQEAFDHLCNKIIATRNPEEIRGGGLLKYCNLLVRGFRPASDEIKTLQRYMCSRFFIDFSDIGEQQRKLESYLQNHFVGLEDRKYEYLMTLHGVVNESTVCLMGHERRQTLNLITMLAIRVLADQNVIPNVANVTCYYQPAPYVADANFSNYYIAQVQPVFTCQQQTYSTWLPCN

SEQ ID NO: 4 - DNA, 1702 bp, Homo Sapiens
acaactgctaaagctccagagacacgagcgtgtgtggcagcaagagccgccagttcgggaccaccgcagctggggtggcagcggcgcaggaggggtcgcggggcgggagtggtgagcgcaggcggcaggggtctgggaaagacgaagtcgctatttgctgtctgagcgcgctcgcagctcctggaagtgttgccgcctctcggtttcgctctcgctcgctgcgctcctagaaggggcggccgcctccaggactgaccagggccaagtggcgctcggcgggcactacatggcggagggtgaagggtacttcgccatgtctgaggacgagctggcctgcagcccctacatccccctaggcggcgacttcggcggcggcgacttcggcggcggcgacttcggcggcggcgacttcggcggcggcgacttcggcggtggcggcagcttcggtgggcattgcttggactattgcgaaagccctacggcgcactgcaatgtgctgaactgggagcaagtgcagcggctggacggcatcctgagtgagaccattccgattcacgggcgcggcaacttccccacgctcgagctgcagccgagcctgatcgtgaaggtggtgcggcggcgcctggccgagaagcgcattggcgtccgcgacgtgcgcctcaacggctcggcagccagccatgtcctgcaccaggacagcggcctgggctacaaggacctggacctcatcttctgcgccgacctgcgcggggaaggggagtttcagactgtgaaggacgtcgtgctggactgcctgttggacttcttacccgagggggtgaacaaagagaagatcacaccactcacgctcaaggaagcttatgtgcagaaaatggttaaagtgtgcaatgactctgaccgatggagtcttatatccctgtcaaacaacagtggcaaaaatgtggaactgaaatttgtggattccctccggaggcagtttgaattcagtgtagattcttttcaaatcaaattagactctcttctgctcttttatgaatgttcagagaacccaatgactgagacatttcaccccacaataatcggggagagcgtctatggcgatttccaggaagcctttgatcacctttgtaacaagatcattgccaccaggaacccagaggaaatccgagggggaggcctgcttaagtactgcaacctcttggtgaggggctttaggcccgcctctgatgaaatcaaggcccttcaaaggtacatgtgttccaggtttttcatcgacttctcagacattggagagcagcagagaaaactggagtcctatttgcagaaccactttgtgggattggaagaccgcaagtatgagtatctcatgacccttcatggagtggtaaatgagagcacagtgtgcctgatgggacatgaaagaagacagactttaaaccttatcaccatgctggctatccgggtgttagctgaccaaaatgtcattcctaatgtggctaatgtcacttgctattaccagccagccccctatgtagcagatgccaactttagcaattactacattgcacaggttcagccagtattcacgtgccagcaacagacctactccacttggctaccctgcaattaagaatcatttaaaaatgtcctgtggggaagccatttcagacaagacaggagagaaaaaaaaaaaaaaaaaaaa

SEQ ID NO: 5 - protein, 661 aa, Homo Sapiens
MKKFSRMPKSEGGSGGGAAGGGAGGAGAGAGCGSGGSSVGVRVFAVGRHQVTLEESLAEGGFSTVFLVRTHGGIRCALKRMYVNNMPDLNVCKREITIMKELSGHKNIVGYLDCAVNSISDNVWEVLILMEYCRAGQVVNQMNKKLQTGFTEPEVLQIFCDTCEAVARLHQCKTPIIHRDLKVENILLNDGGNYVLCDFGSATNKFLNPQKDGVNVVEEEIKKYTTLSYRAPEMINLYGGKPITTKADIWALGCLLYKLCFFTLPFGESQVAICDGNFTIPDNSRYSRNIHCLIRFMLEPDPEHRPDIFQVSYFAFKFAKKDCPVSNINKCCKQLLRHGALLTEILLFLQLFLNRMTASEAAARKSQIKARITDTIGPTETSIAPRQRPKANSATTATPSVLTIQSSATPVKVLAPGEFGNHRPKGALRPGNGPEILLGQGPPQQPPQQHRVLQQLQQGDWRLQQLHLQHRHPHQQQQQQQQQQQHHHHHHHHLLQDAYMQQYQHATQQQQMLQQQFLMHSVYQPQPSASQYPTMMPQYQQAFFQQQMLAQHQPSQQQASPEYLTSPQEFSPALVSYTSSLPAQVGTIMDSSYSANRSVADKEAIANFTNQKNISNPPDMSGWNPFGEDNFSKLTEEELLDREFDLLRSSKGHLKAYFASQ

SEQ ID NO: 6 - DNA, 2715 bp, Homo Sapiens
agccgggcagctgcagcggagccgcggagcgggcggcggggcccaggctgtgcgcttggggagcgcggaatgtgaggcttggcgggccgcagcacgctcggacgggccaggggcggcgacccctcgcggacgcccggctgcgcgccgggccggggacttgcccttgcacgctccctgcgccctccagctcgccggcgggaccatgaagaagttctctcggatgcccaagtcggagggcggcagcggcggcggagcggcgggtggcggggctggcggggccggggccggggccggctgcggctccggcggctcgtccgtgggggtccgggtgttcgcggtcggccgccaccaggtcaccctggaagagtcgctggccgaaggtggattctccacagttttcctcgtgcgtactcacggtggaatccgatgtgcattgaagcgaatgtatgtcaataacatgccagacctcaatgtttgtaaaagggaaattacaattatgaaagagctatctggtcacaaaaatattgtgggctatttggactgtgctgttaattcaattagtgataatgtatgggaagtccttatcttaatggaatattgtcgagctggacaggtagtgaatcaaatgaataagaagctacagacgggttttacagaaccagaagtgttacagatattctgtgatacctgtgaagctgttgcaaggttgcatcagtgtaagactccaataattcaccgggatctgaaggtagaaaatattttgttgaatgatggtgggaactatgtactttgtgactttggcagtgccactaataaatttcttaatcctcaaaaagatggagttaatgtagtagaagaagaaattaaaaagtatacaactctgtcatacagagcccctgaaatgatcaacctttatggagggaaacccatcaccaccaaggctgatatctgggcactgggatgtctactctataaactttgtttcttcactcttccttttggtgagagtcaggttgctatctgtgatggcaacttcaccatcccagacaattctcgttactcccgtaacatacattgcttaataaggttcatgcttgaaccagatccggaacatagacctgatatatttcaagtgtcatattttgcatttaaatttgccaaaaaggattgtccagtctccaacatcaataagtgttgtaaacaattactgagacacggagcactgttaactgaaattcttctattccttcagctcttcctgaaccgatgactgctagtgaagcagctgctaggaaaagccaaataaaagccagaataacagataccattggaccaacagaaacctcaattgcaccaagacaaagaccaaaggccaactctgctactactgccactcccagtgtgctgaccattcaaagttcagcaacacctgttaaagtccttgctcctggtgaattcggtaaccatagaccaaaaggggcactaagacctggaaatggccctgaaattttattgggtcagggacctcctcagcagccgccacagcagcatagagtactccagcaactacagcagggagattggagattacagcaactccatttacagcatcgtcatcctcaccagcagcagcagcagcagcagcagcagcagcagcaccaccaccaccaccaccaccacctacttcaagatgcttatatgcagcagtatcaacatgcaacacagcagcaacagatgcttcaacaacaatttttaatgcattcggtatatcaaccacaaccttctgcatcacagtatcctacaatgatgccgcagtatcagcaggctttctttcaacagcagatgctagctcaacatcagccgtctcaacaacaggcatcacctgaatatcttacctcccctcaagagttctcaccagccttagtttcctacacttcatcacttccagctcaggttggaaccataatggactcctcctatagtgccaataggtcagttgctgataaagaggccattgcaaatttcacaaatcagaagaacatcagcaatccacctgatatgtcagggtggaatccttttggagaggataatttctctaagttaacagaagaggaactattggacagagaatttgaccttctaagatcaagtaagggacacttgaaggcttattttgcttcacagtaaaataacagctctattattattcagcaaggccaaagacttttgagaatgtgtatggaaaattctttttgtgcatttgagggcaaaattcaggccatcttcttatacatatactatcaaattatgttgtgtgcattagaaatcagttgcttgatagtagctattaaacccaatattgctgatagtatgctaatatcctaaaacttaaatattgcatatctatgaatgttaaattcagaatatctctaaaacatggaaaattgatgtttcaataaaaagggagacattttattattttgccttactaatgattttgcagctctgtttttctgcacactcaatagaaaatattgtgggtctgagatgccctttgaaaatgcctgaaagaaaacatgggctactacattatgttaatgttttgtaatgtccttttaatgagtggtgacataaaagggctgctttgttgtcctgatatggcaaaaattaaataaattctttttcactttaaaaaaaaaaaaaaaaaaaaaaaaa

SEQ ID NO: 7 - protein, 657 aa, Homo Sapiens
MQWRALVLGLVLLRLGLHGVLWLVFGLGPSMGFYQRFPLSFGFQRLRSPDGPASPTSGPVGRPGGVSGPSWLQPPGTGAAQSPRKAPRRPGPGMCGPANWGYVLGGRGRGPDEYEKRYSGAFPPQLRAQMRDLARGMFVFGYDNYMAHAFPQDELNPIHCRGRGPDRGDPSNLNINDVLGNYSLTLVDALDTLAIMGNSSEFQKAVKLVINTVSFDKDSTVQVFEATIRVLGSLLSAHRIITDSKQPFGDMTIKDYDNELLYMAHDLAVRLLPAFENTKTGIPYPRVNLKTGVPPDTNNETCTAGAGSLLVEFGILSRLLGDSTFEWVARRAVKALWNLRSNDTGLLGNVVNIQTGHWVGKQSGLGAGLDSFYEYLLKSYILFGEKEDLEMFNAAYQSIQNYLRRGREACNEGEGDPPLYVNVNMFSGQLMNTWIDSLQAFFPGLQVLIGDVEDAICLHAFYYAIWKRYGALPERYNWQLQAPDVLFYPLRPELVESTYLLYQATKNPFYLHVGMDILQSLEKYTKVKCGYATLHHVIDKSTEDRMESFFLSETCKYLYLLFDEDNPVHKSGTRYMFTTEGHIVSVDEHLRELPWKEFFSEEGGQDQGGKSVHRPKPHELKVINSSSNCNRVPDERRYSLPLKSIYMRQIDQMVGLI

SEQ ID NO: 8 - DNA, 6072 bp, Homo Sapiens
ggtggtcggcggggaggcccccgcgctttaaaataatgcccgcggcgcccgcgcgaccatgcaatggcgagcgctcgtcctggggctggtgctcctccggcttggcctccatggagtattgtggctcgtcttcgggctggggcccagcatgggcttctaccagcgctttccgctcagcttcggcttccagcgtctgaggagccccgacggccccgcgtcgcccacctcggggcccgtgggccggcctgggggggtatccgggccgtcgtggctgcagccgccggggaccggggcagcgcagagcccgcgcaaggctccgcggcgtcctgggccggggatgtgcggcccagccaactggggctacgtgctgggcggccggggccgcggcccggacgagtacgagaagcgctacagcggcgccttccctccgcagctgcgtgcccagatgcgcgacctggcacggggcatgttcgtctttggctacgacaactacatggctcacgccttcccccaggacgagctcaaccccatccactgccgcggccgtgggcccgaccgcggggacccttcaaatctgaacatcaatgatgtactagggaactactcattgactcttgttgatgcattggatacacttgcaataatgggaaattcatccgagttccagaaagcagtcaagttagtgatcaacacagtttcatttgacaaagattccaccgtccaagtctttgaggccacgataagggtcctgggaagcctcctttctgctcacagaataataactgactccaagcagccctttggtgacatgacaattaaggactatgataatgagttgttatacatggcccatgacctggcggtgcggctcctccctgcttttgaaaacaccaagacagggattccatatcctcgggtgaatctaaagacaggagttcctcctgacaccaataatgagacatgcacagcgggagccggttccctcctggtggaatttgggattctgagtcgactcctgggggactccacatttgagtgggtggccagacgagcagtgaaagccctttggaacctccggagcaatgatacaggattactaggcaatgtcgtgaacattcagacgggccactgggttggaaagcagagtggcctgggtgccgggctggactccttctatgaatacctcttgaaatcttacattctctttggagaaaaagaagacctagaaatgtttaatgctgcatatcagagtattcagaactacttaagaagagggcgggaagcctgcaatgaaggagaaggagaccctccactctatgtcaacgtgaacatgttcagtgggcagctgatgaacacctggattgactctctgcaggcctttttccctggactgcaggtgctgataggagatgtggaagatgccatctgccttcatgccttctactatgccatatggaaacgatatggtgccctccctgagagatataactggcagctgcaggcccctgacgttctcttctacccactgagaccagagttagtggaatccacatatctcctctaccaggcaaccaagaatcccttctacctccatgtaggaatggatattctgcagagtctggaaaagtacacaaaagtcaagtgtgggtacgccacgctgcatcacgtcattgacaagtccacagaagaccggatggagagcttctttctcagtgagacctgtaaatatttgtatctgctgtttgatgaagacaatccagtacacaagtctggaaccagatacatgttcacaacagagggacacattgtatctgtggatgagcatcttcgggaattgccatggaaggaattcttctctgaagagggagggcaggaccaagggggaaagtctgtgcacaggccgaaacctcatgagttaaaagtcatcaactccagctccaactgcaatcgtgtacctgatgagaggaggtactccctgcccttaaagagcatctacatgcgacagattgaccagatggttggtttgatttgatctgctctctgtgaggcctcatcttgaaccagaccttaacgaccaaacccagaccatgccaaagtccagtctgaaatgaaaggggacagaagtcttgctgtccatggtggtgtaggaatttctgtgcaacacctcaccacgtctggttaatccttgcacacttcagtgtttctctcctgttcaataaaatgccctgttaaggatataatttgaagtgagaagatacatggaaattgccctcttatgacatgttgatgttataagcacaatagatggggcatctttggattgatgttcacagctttatacttcagaacctaagtctcttcactttgctggcacctgctatactggagtattgctatgtctttaaaaaatttttttttattatattttatttttttgagacagggtcttgatatttttttgggacagggttacctgggctcaagtgatccttctgcctcagcctcccgagtagctgggattacaggtgagcaccactgtacctggctagctacttctttgttagaggattgagaatgaaatttctgcaaaagggcccatggttcatttggtatccctatttaattgcattgaaaatgtcatcctttctgttgttagataattggggtcttcccctgatatccaaccgtgattttggatcacatgggagaaaaagtcatccagtttttcatgtttgcctcaagtaatctttacagtgttacaaattatttgcttaagaagaatggtcttaaccagaattcttaacagatagtctcttaggttattatgttatggtctaagaggttaactgacatcttttggatggtattttgcattttgaatatgaacttacctgaggaactcccatagttccagaatcaggtgccttttagggagagaacaatacctaagattgtctgagcttccatctttctcatatttcctaagcaaggattctcacttatgaccatatttgggttagagttctgttttgtttctgttttctgtgtctagtgccaattagctaaatcagggagaaagaaatgatcacatgacttttagcatccttgagccatttctctgtgtaatacaggctttagattagtgccttatattggttttggtttggggcactggatgtcgcagctactgctatggtttcaggaggcctgtttagccacatggtgagaccgtggtgaaagggggatggaaattgcttggccagtctttgcctttcatcctgtaaaagtaagcatgtagaaggaggaagttgtgctaaaatgcctttgtttttttgttattattttcttagccagaacatctctctttgaactcacactgatacacacctgctactcttacacagtgcagcagggctgactcttagtctggcttccatgaagcgtcatgggtggaaacgcattctagtaaaaaaggtaggaaatccctaaaacttccagcctcacatagcacggttctcacctgtcactgttttcccacctctaaggatttcatgtacatcttttcaaagctagaaataagcactgtctaagtttatgttgcatttttagtcaaaagggagaaatcttattccttcttgaaaattttaagtgttatggttttatatagttcagttctttgagatttttgaaaagagtattttcagtaataaacgtgccatctctatctcttaaacatttattacaacaattgttttaaaatagaaaaaataaaatgcttctattttaccttttttcatttcagaagcattattctgtttattaacagtgtcccatctactgaatagaaaactttgagaataatatatatatatattttaaatgttttcactgactcattgaaaatgttaattacacacacatgcatgcatgcacacacgagcatacttgtacctttgtctctgggcaaacaggtgggactgttagtgacccatttgggaaaatagagcatctcagagaaggaggtgagttcttcctgcctgtgatttctcttggcgctcccctcctctcccgctctggcttctgtggcggcagtggtgggtaagcactccagtgttctcttaatgaggcactttgcctgtcactcgagcaagcctgggtgttccttcctcctcatgctcctggaatagggaatagggatctcatgcttgcaaactacacaatgctgcaggtgcttcccaggggccacaggctgtcaggaaacgtgttttatgttaagtcacaaacccacttgacttctgggtactggaattaataccagtgggtgagactgagggtgagtgagttagtacatattaatcctggttgttgagcttccagactaccccgtccaaagtttgatgctatgtagtcagtggtttgtggggctggatgccagaaggttctttgagccagtttcaaaggttacttgtttttttttttttttttttaagtcagaatgttaacagctgtgatatatcctgcagggcttttgcagtttcttctgttctgtgttctgaaatcctgggtagagaatggctgaggaggagattaccagagaagttgctttgctcagtgctttgccccaggattgcctcaaatctgagtggacttcatcctttgcggcggctctgagcctggcccatcttcctattcccacgtgtagctagtgtctagtgtcagctttgctcaatgtggtggaaacattttgcagaactgttgtagaaagctgccttatagttggcttgacaaagcataattctctcataacaaactttcaaatcattacagtagcttagctactttagttgatgtgaccgaggaatcccttctagaatcataggtggcaagggagggtttgctagctctccatttgcactggccattgtgaaaaaccagcttctgtattcaaatctttccttcatttttttaaattttttttttggcagcgcttgtgctggaacttactcattgtaactgaatcctcagggcttttcttgttttagatcatggactgtgcacgtgacacttaaataattttctatgtatttaaagaaaaatgcaccaggatggtgtctgtgcacgtgactattagaggagcgtctgtagaagtacctggtttggtcagtgcagttgtgcaatctgagggccttgtttcctcctcccctttccccttctccccaccaaaggaaaatatccctcttaatgatttcgtagttcagtttactgaatgattaccacctgtaattcctctttggattgtgtagactcaacatgagacattcctttctgctttctggagggcaccaggggcctttctctttgataaattttttttgtctgttgacaaaaacaaaaatcttttttcaaatgtagtgctggtgaaaaggtagggctgagtgattaccttagccacagggtggctgagcaggaactttagaagaaaatcctgagctttcctgtccattcccagcatccagctcctattctagtgcctcttccctgcagggcagggaccccttgggaaatcgaggaggtgggacgggctgggccctgtgtcccaggtttcacagggctcagggttatgctcccgcttgaatctggacgtgaatctggtaaaaatatcaagtacctgtggaactccctgattctataccctcttccttctttctgcaaggcagaggaataatatttttaaaggttattttgttttagttttaaatagcaaaacacaagctgcatttttatttattttgcataagaaaggtaaatctttttacaaaaaaaagtatagagttggaaactctgggaaaacttacggaaatacacaaatgcttctctgtaatgtgcaatatgctttgcaactgtagatgatattttatgtttaatctgtaaataagaaatgtatttaaattaaaagggatctttttgtaaaaggaccaaatgttcttttataaatgtaataaggaatatcttgctctttaaaatttattaggatttttatgagtaatttttattaaaagatttctttttttg

SEQ ID NO: 9 - protein, 697 aa, Homo Sapiens
MACEIMPLQSSQEDERPLSPFYLSAHVPQVSNVSATGELLERTIRSAVEQHLFDVNNSGGQSSEDSESGTLSASSATSARQRRRQSKEQDEVRHGRDKGLINKENTPSGFNHLDDCILNTQEVEKVHKNTFGCAGERSKPKRQKSSTKLSELHDNQDGLVNMESLNSTRSHERTGPDDFEWMSDERKGNEKDGGHTQHFESPTMKIQEHPSLSDTKQQRNQDAGDQEESFVSEVPQSDLTALCDEKNWEEPIPAFSSWQRENSDSDEAHLSPQAGRLIRQLLDEDSDPMLSPRFYAYGQSRQYLDDTEVPPSPPNSHSFMRRRSSSLGSYDDEQEDLTPAQLTRRIQSLKKKIRKFEDRFEEEKKYRPSHSDKAANPEVLKWTNDLAKFRRQLKESKLKISEEDLTPRMRQRSNTLPKSFGSQLEKEDEKKQELVDKAIKPSVEATLESIQRKLQEKRAESSRPEDIKDMTKDQIANEKVALQKALLYYESIHGRPVTKNERQVMKPLYDRYRLVKQILSRANTIPIIGSPSSKRRSPLLQPIIEGETASFFKEIKEEEEGSEDDSNVKPDFMVTLKTDFSARCFLDQFEDDADGFISPMDDKIPSKCSQDTGLSNLHAASIPELLEHLQEMREEKKRIRKKLRDFEDNFFRQNGRNVQKEDRTPMAEEYSEYKHIKAKLRLLEVLISKRDTDSKSM

SEQ ID NO: 10 - DNA, 4491 bp, Homo Sapiens
aaatgtagagaagcagccgataaaatagcattgcctgaagaagtttggaggctgagagcagcagtagactggccaactgcagagcaagttgtttctccagccgtgcggtgcagcctcatgcccccaacccagcttagccactgtaagaagacgttcactgtacagacgaccaaacttgccgtggaagagacagttgtgagattcccttgcaaatttacatacgagaatggcttgtgaaatcatgcctctgcaaagttcacaggaagatgaaagacctctgtcacctttctatttgagtgctcatgtaccccaagtcagcaatgtgtctgcaaccggagaactcttagaaagaaccatccgatcagctgtagaacaacatctttttgatgttaataactctggaggtcaaagttcagaggactcagaatctggaacactatcagcatcttctgccacatctgccagacagcgccgccgccagtccaaggagcaggatgaagttcgacatgggagagacaagggacttatcaacaaagaaaatactccttctgggttcaaccaccttgatgattgtattttgaatactcaggaagtcgaaaaggtacacaaaaatacttttggttgtgctggagaaaggagcaagcctaaacgtcagaaatccagtactaaactttctgagcttcatgacaatcaggacggtcttgtgaatatggaaagtctcaattccacacgatctcatgagagaactggacctgatgattttgaatggatgtctgatgaaaggaaaggaaatgaaaaagatggtggacacactcagcattttgagagccccacaatgaagatccaggagcatcccagcctatctgacaccaaacagcagagaaatcaagatgccggtgaccaggaggagagctttgtctccgaagtgccccagtcggacctgactgcattgtgtgatgaaaagaactgggaagagcctatccctgctttctcctcctggcagcgggagaacagtgactctgatgaagcccacctctcgccgcaggctgggcgcctgatccgtcagctgctggacgaagacagcgaccccatgctctctcctcggttctacgcttatgggcagagcaggcaatacctggatgacacagaagtgcctccttccccaccaaactcccattctttcatgaggcggcgaagctcctctctggggtcctatgatgatgagcaagaggacctgacacctgcccagctcacacgaaggattcagagccttaaaaagaagatccggaagtttgaagatagattcgaagaagagaagaagtacagaccttcccacagtgacaaagcagccaatccggaggttctgaaatggacaaatgaccttgccaaattccggagacaacttaaagaatcaaaactaaagatatctgaagaggacctaactcccaggatgcggcagcgaagcaacacactccccaagagttttggttcccaacttgagaaagaagatgagaagaagcaagagctggtggataaagcaataaagcccagtgttgaagccacattggaatctattcagaggaagctccaggagaagcgagcggaaagcagccgccctgaggacattaaggatatgaccaaagaccagattgctaatgagaaagtggctctgcagaaagctctgttatattatgaaagcattcatggacggccggtaacaaagaacgaacggcaggtgatgaagccactatacgacaggtaccggctggtcaaacagatcctctcccgagctaacaccatacccatcattggttccccctccagcaagcggagaagccctttgctgcagccaattatcgagggcgaaactgcttccttcttcaaggagataaaggaagaagaggaggggtcagaagacgatagcaatgtgaagccagacttcatggtcactctgaaaaccgatttcagtgcacgatgctttctggaccaattcgaagatgacgctgatggatttatttccccaatggatgataaaataccatcaaaatgcagccaggacacagggctttcaaatctccatgctgcctcaatacctgaactcctggaacacctccaggaaatgagagaagaaaagaaaaggattcgaaagaaacttcgggattttgaagacaactttttcagacagaatggaagaaatgtccagaaggaagaccgcactcctatggctgaagaatacagtgaatataagcacataaaggcgaaactgaggctcctggaggtgctcatcagcaagagagacactgattccaagtccatgtgaggggcatggccaagcacagggggctggcagctgcggtgagagtttactgtccccagagaaagtgcagctctggaaggcagccttggggctggccctgcaaagcatgcagcccttctgcctctagaccatttggcatcggctcctgtttccattgcctgccttagaaactggctggaagaagacaatgtgacctgacttaggcattttgtaattggaaagtcaagactgcagtatgtgcacatgcgcacgcgcatgcacgcacacacacacacagtagtggagctttcctaacactagcagagattaatcactacattagacaacactcatctacagagaatatacactgttcttccctggataactgagaaacaagagaccattctctgtctaactgtgataaaaacaagctcaggactttattctatagagcaaacttgctgtggagggccatgctctccttggacccagttaactgcaaacgtgcattggagccctatttgctgccgctgccattctagtgacctttccacagagctgcgccttcctcacgtgtgtgaaaggttttccccttcagccctcaggtagatggaagctgcatctgcccacgatggcagtgcagtcatcatcttcaggatgtttcttcaggacttcctcagctgacaaggaattttggtccctgcctaggaccgggtcatctgcagaggacagagagatggtaagcagctgtatgaatgctgattttaaaaccaggtcatgggagaagagcctggagattctttcctgaacactgactgcacttaccagtctgattttatcgtcaaacaccaagccaggctagcatgctcatggcaatctgtttggggctgttttgttgtggcactagccaaacataaaggggcttaagtcagcctgcatacagaggatcggggagagaaggggcctgtgttctcagcctcctgagtacttaccagagtttaatttttttaaaaaaaatctgcactaaaatccccaaactgacaggtaaatgtagccctcagagctcagcccaaggcagaatctaaatcacactattttcgagatcatgtataaaaagaaaaaaaagaagtcatgctgtgtggccaattataatttttttcaaagactttgtcacaaaactgtctatattagacattttggagggaccaggaaatgtaagacaccaaatcctccatctcttcagtgtgcctgatgtcacctcatgatttgctgttacttttttaactcctgcgccaaggacagtgggttctgtgtccacctttgtgctttgcgaggccgagcccaggcatctgctcgcctgccacggctgaccagagaaggtgcttcaggagctctgccttagacgacgtgttacagtatgaacacacagcagaggcaccctcgtatgttttgaaagttgccttctgaaagggcacagttttaaggaaaagaaaaagaatgtaaaactatactgacccgttttcagttttaaagggtcgtgagaaactggctggtccaatgggatttacagcaacattttccattgctgaagtgaggtagcagctctcttctgtcagctgaatgttaaggatggggaaaaagaatgcctttaagtttgctcttaatcgtatggaagcttgagctatgtgttggaagtgccctggttaatccatacacaaagacggtacataatcctacaggtttaaatgtacataaaaatatagtttggaattctttgctctactgtttacattgcagattgctataatttcaaggagtgagattataaataaaatgatgcactttaggatgtttcctatttttgaaatctgaacatgaatcattcacatgaccaaaaattgtgtttttttaaaaatacatgtctagtctgtcctttaatagctctcttaaataagctatgatattaatcagatcattaccagttagcttttaaagcacatttgtttaagactatgtttttggaaaaatacgctacagaatttttttttaagctacaaataaatgagatgctactaattgttttggaatctgttgtttctgccaaaggtaaattaactaaagatttattcaggaatccccatttgaatttgtatgattcaataaaagaaaacaccaagtaagttatataaaat

SEQ ID NO: 11 - protein, 821 aa, Homo Sapiens
MLKGVQRKRADKYWEYTFKVNWSDLSVTTVTKTHQELQEFLLKLPKELSSETFDKTILRALNQGSLKREERRHPDLEPILRQLFSSSSQAFLQSQKVHSFFQSISSDSLHSINNLQSSLKTSKILEHLKEDSSEASSQEEDVLQHAIIHKKHTGKSPIVNNIGTSCSPLDGLTMQYSEQNGIVDWRKQSCTTIQHPEHCVTSADQHSAEKRSLSSINKKKGKPQTEKEKIKKTDNRLNSRINGIRLSTPQHAHGGTVKDVNLDIGSGHDTCGETSSESYSSPSSPRHDGRESFESEEEKDRDTDSNSEDSGNPSTTRFTGYGSVNQTVTVKPPVQIASLGNENGNLLEDPLNSPKYQHISFMPTLHCVMHNGAQKSEVVVPAPKPADGKTIGMLVPSPVAISAIRESANSTPVGILGPTACTGESEKHLELLASPLPIPSTFLPHSSTPALHLTVQRLKLPPPQGSSESCTVNIPQQPPGSLSIASPNTAFIPIHNPGSFPGSPVATTDPITKSASQVVGLNQMVPQIEGNTGTVPQPTNVKVVLPAAGLSAAQPPASYPLPGSPLAAGVLPSQNSSVLSTAATSPQPASAGISQAQATVPPAVPTHTPGPAPSPSPALTHSTAQSDSTSYISAVGNTNANGTVVPPQQMGSGPCGSCGRRCSCGTNGNLQLNSYYYPNPMPGPMYRVPSFFTLPSICNGSYLNQAHQSNGNQLPFFLPQTPYANGLVHDPVMGSQANYGMQQMAGFGRFYPVYPAPNVVANTSGSGPKKNGNVSCYNCGVSGHYAQDCKQSSMEANQQGTYRLRYAPPLPPSNDTLDSAD

SEQ ID NO: 12 - DNA, 3211 bp, Homo Sapiens
atcggaaaagcaccttgagttactggcttcccctttacctattccatcaaccttccttccacacagtagtactcccgctttgcatcttacagttcagaggctaaagttgccaccaccacagggatcttctgagagctgcacagttaacatcccacaacaaccacccggaagcctgagcatcgcatcaccaaacactgcctttattcctatccataacccaggtagtttcccaggctctcctgttgctaccacggaccccatcacaaaatctgcatcccaagtggtaggactcaatcaaatggtgcctcaaattgagggaaacacagggacagtccctcagcctaccaatgtgaaggtagttcttccagcagctggcctctcagctgctcagccaccagcttcctaccccttaccaggctctccccttgctgccggcgtgttacccagccagaactccagtgtgctcagcacagcagcaacttctccccagccagcgagcgcaggtatcagccaggcccaggcaactgttcctcctgcagttcctacccacaccccaggccctgccccgagcccaagccctgccttgacacacagtaccgcgcagagtgacagcacctcttacatcagtgctgtggggaacacgaacgctaatgggacagtagtgccaccgcagcagatgggctcaggtccttgtggttcttgtgggcgaaggtgcagctgtgggaccaatggaaaccttcagctaaatagttactattatcctaatccaatgcctggaccaatgtaccgagtcccttcattctttactctgccatccatttgcaatggcagctacctcaaccaagcacatcagagcaatggaaaccaacttcctttttttctgcctcagactccatatgcaaatggactggtacatgacccagtcatggggagccaagccaactatggcatgcagcagatggcaggatttgggagattctatcctgtatatccagcacctaacgtagttgccaacaccagtggttcggggcccaagaagaatgggaatgtctcatgttacaattgtggtgtaagcggacactacgcacaggactgtaagcagtcgtccatggaggccaatcaacaaggcacttacagactgagatacgcacctcccctccccccttctaatgatacgttggattctgcagactgaaacgagtaaagcttgcctacttaatacactcaagtgtggggagtcatggggtgtggaggggaggaaaggaaaggtattttgtttctttgtctatacatttcctagatttctatgcagttgggatttttcatttctcttgtaccaatgtccaaaacaagaaagaatgcaatgcttttgagcctctggtctcctggttcaacaacaggcttatatgtatgatacatgtaatttaaaccttcagacaaacttaaatgttggtgcgtgcttttttttttttttacactgaatacttgctgtgtgcaatgtttactgaatctttaaaactgtgtatttgaccttttttttacaacactggtgacagtcatatggttttgaaaaaaaaaagaaattttgcttcttcccagcttttctcactttcaccctaaacgacacttcctccccagccagcctcactctgtctccggcccgcagcaggagcagccagcagtgcattcaccccacttttgtaaactgctctgcatataaaccaagggcagaatgtttcaccctgatcttatgggaggaatcgaactcccaaaatagtgtgtatatatgtaataaacagcgtcacgtaaatacatatatgcagtgcttgttgtccaaatagaaatgaaaataagtggaagagagaggaagaagtcaaccatatgaaactgaaaaaatatgacgtacgaaatggacaaaaagctttttctgaaaccaactttttacttccatcatccttttttagcctgttgcttcagagagacacaaagtgaacacactggtgtgaatgtcgctctctgtgtgcttgtgtttgtaatgaaagtctacagccaattttacttgtctaccaccgtgttgtgctcaaagagacactacttgagtgaagatttcttctttccctgtaccagctgttacagtgttacgttgtgtttaaaatgtgtatggtttattgcaatctgaacagagctatgggtttctaccataagtcaggttgtttgttccctaacctgtctctcgtagcaaagtcacttttataacagtttaccactatgcttgattataatgtgaaaggcggaattctgagtgtgttaagatggtattaatcatgtcggtgtcatgtcactaagtttaatgctgctgtttttaaaaaaaaaaaaagtttttttaaaaagccaatctatgtactaaattgcttccaggtaatttttgatttcctaaagtgcactgaggttatctggaagattgggtgtattttttggtgactgctgcattcatcagcaatgaacagtttccactgtatagtcctaggggtcagggggtgggggtttcattttccattcctcagcacagagcagaaatgatagatttttattgtttggagtaacgttggtatgcagcagaggaacataaacatttggtcttggttcagaagcctaacagattgctagacaagagaaaaaacttgaagaaaaaagaagcttaatttcatgcttcataagtagcatttatatttatagcaccaatgtacattttgaaactttctttcaggggtgggagttatggggaaggggtgggtgtgaaggggtagatgaaagctttaatttagaaagaaagttcaagtaaaggaaattattttgattaaatatattttatttgatctgggtatttttggaccacattattaaattaattgttaagctgcagttgagttgttcaagtgagagttttgataagccacttatgggccgcgttgtgaatcacttgccagttgtactttatggagcttattttatgatttaaaatactgtactgtacataggaggtatgttaccttctccttatttgtatgtttaccatatactttgatatttgaaatgttatgtactggaaaggccacttatatttctagaacagattggattttatgcaaccttttttccttgaattaacagcaataaaaaaatgaaaaacaaaaaaaaaaaaaaaaaaaaa

SEQ ID NO: 13 - protein, 1119 aa, Homo Sapiens
RIFGASPPRNLAIQKCASRTAAAMGSEDHGAQNPSCKIMTFRPTMEEFKDFNKYVAYIESQGAHRAGLAKIIPPKEWKPRQTYDDIDDVVIPAPIQQVVTGQSGLFTQYNIQKKAMTVGEYRRLANSEKYCTPRHQDFDDLERKYWKNLTFVSPIYGADISGSLYDDDVAQWNIGSLRTILDMVERECGTIIEGVNTPYLYFGMWKTTFAWHTEDMDLYSINYLHFGEPKSWYAIPPEHGKRLERLAIGFFPGSSQGCDAFLRHKMTLISPIILKKYGIPFSRITQEAGEFMITFPYGYHAGFNHGFNCAESTNFATLRWIDYGKVATQCTCRKDMVKISMDVFVRILQPERYELWKQGKDLTVLDHTRPTALTSPELSSWSASRASLKAKLLRRSHRKRSQPKKPKPEDPKFPGEGTAGAALLEEAGGSVKEEAGPEVDPEEEEEEPQPLPHGREAEGAEEDGRGKLRPTKAKSERKKKSFGLLPPQLPPPPAHFPSEEALWLPSPLEPPVLGPGPAAMEESPLPAPLNVVPPEVPSEELEAKPRPIIPMLYVVPRPGKAAFNQEHVSCQQAFEHFAQKGPTWKEPVSPMELTGPEDGAASSGAGRMETKARAGEGQAPSTFSKLKMEIKKSRRHPLGRPPTRSPLSVVKQEASSDEEASPFSGEEDVSDPDALRPLLSLQWKNRAASFQAERKFNAAAARTEPYCAICTLFYPYCQALQTEKEAPIASLGEGCPATLPSKSRQKTRPLIPEMCFTSGGENTEPLPANSYIGDDGTSPLIACGKCCLQVHASCYGIRPELVNEGWTCSRCAAHAWTAECCLCNLRGGALQMTTDRRWIHVICAIAVPEARFLNVIERHPVDISAIPEQRWKLKCVYCRKRMKKVSGACIQCSYEHCSTSFHVTCAHAAGVLMEPDDWPYVVSITCLKHKSGGHAVQLLRAVSLGQVVITKNRNGLYYRCRVIGAASQTCYEVNFDDGSYSDNLYPESITSRDCVQLGPPSEGELVELRWTDGNLYKAKFISSVTSHIYQVEFEDGSQLTVKRGDIFTLEEELPKRVRSRLSLSTGAPQEPAFSGEEAKAAKRPRVGTPLATEDSGRSQDYVAFVESLLQVQGRPGAPF

SEQ ID NO: 14 - DNA, 5591 bp, Homo Sapiens
gtcgccagcaaccgagcggggcacgcccgagcggggcctgggggtgcgagccgagggcgggggagagcgcgccgctgctcccggaccgggccgcgcacgccgcctcaggaaccatcactgttgctggaggcacctgacaaatcctagcgaatttttggagcatctccacccaggaacctcgccatccagaagtgtgcttcccgcacagctgcagccatggggtctgaggaccacggcgcccagaaccccagctgtaaaatcatgacgtttcgcccaaccatggaagaatttaaagacttcaacaaatacgtggcctacatagagtcgcagggagcccaccgggcgggcctggccaagatcatccccccgaaggagtggaagccgcggcagacgtatgatgacatcgacgacgtggtgatcccggcgcccatccagcaggtggtgacgggccagtcgggcctcttcacgcagtacaatatccagaagaaggccatgacagtgggcgagtaccgccgcctggccaacagcgagaagtactgtaccccgcggcaccaggactttgatgaccttgaacgcaaatactggaagaacctcacctttgtctccccgatctacggggctgacatcagcggctctttgtatgatgacgacgtggcccagtggaacatcgggagcctccggaccatcctggacatggtggagcgcgagtgcggcaccatcatcgagggcgtgaacacgccctacctgtacttcggcatgtggaagaccaccttcgcctggcacaccgaggacatggacctgtacagcatcaactacctgcactttggggagcctaagtcctggtacgccatcccaccagagcacggcaagcgcctggagcggctggccatcggcttcttccccgggagctcgcagggctgcgacgccttcctgcggcataagatgaccctcatctcgcccatcatcctgaagaagtacgggatccccttcagccggatcacgcaggaggccggggaattcatgatcacatttccctacggctaccacgccggcttcaatcacgggttcaactgcgcagaatctaccaacttcgccaccctgcggtggattgactacggcaaagtggccactcagtgcacgtgccggaaggacatggtcaagatctccatggacgtgttcgtgcgcatcctgcagcccgagcgctacgagctgtggaagcagggcaaggacctcacggtgctggaccacacgcggcccacggcgctcaccagccccgagctgagctcctggagtgcatcccgggcctcgctgaaggccaagctcctccgcaggtctcaccggaaacggagccagcccaagaagccgaagcccgaagaccccaagttccctggggagggtacggctggggcagcgctcctagaggaggctgggggcagcgtgaaggaggaggctgggccggaggttgaccccgaggaggaggaggaggagccgcagccactgccacacggccgggaggccgagggcgcagaagaggacgggaggggcaagctgcggccaaccaaggccaagagcgagcggaagaagaagagcttcggcctgctgcccccacagctgccgcccccgcctgctcacttcccctcagaggaggcgctgtggctgccatccccactggagcccccggtgctgggcccaggccctgcagccatggaggagagccccctgccggcaccccttaatgtcgtgccccctgaggtgcccagtgaggagctagaggccaagcctcggcccatcatccccatgctgtacgtggtgccgcggccgggcaaggcagccttcaaccaggagcacgtgtcctgccagcaggcctttgagcactttgcccagaagggtccgacctggaaggaaccagtttcccccatggagctgacggggccagaggacggtgcagccagcagtggggcaggtcgcatggagaccaaagcccgggccggagaggggcaggcaccgtccacattttccaaattgaagatggagatcaagaagagccggcgccatcccctgggccggccgcccacccggtccccactgtcggtggtgaagcaggaggcctcaagtgacgaggaggcatcccctttctccggggaggaagatgtgagtgacccggacgccttgaggccgctgctgtctctgcagtggaagaacagggcggccagcttccaggccgagaggaagttcaacgcagcggctgcgcgcacggagccctactgcgccatctgcacgctcttctacccctactgccaggccctacagactgagaaggaggcacccatagcctccctcggaaagggctgcccggccacattaccctccaaaagccgtcagaagacccgaccgctcatccctgagatgtgcttcacctctggcggtgagaacacggagccgctgcctgccaactcctacatcggcgacgacgggaccagccccctgatcgcctgcggcaagtgctgcctgcaggtccatgccagttgctatggcatccgtcccgagctggtcaatgaaggctggacgtgttcccggtgcgcggcccacgcctggactgcggagtgctgcctgtgcaacctgcgaggaggtgcgctgcagatgaccaccgataggaggtggatccacgtgatctgtgccatcgcagtccccgaggcgcgcttcctgaacgtgattgagcgccaccctgtggacatcagcgccatccccgagcagcggtggaagctgaaatgcgtgtactgccggaagcggatgaagaaggtgtcaggtgcctgtatccagtgctcctacgagcactgctccacgtccttccacgtgacctgcgcccacgccgcaggcgtgctcatggagccggacgactggccctatgtggtctccatcacctgcctcaagcacaagtcggggggtcacgctgtccaactcctgagggccgtgtccctaggccaggtggtcatcaccaagaaccgcaacgggctgtactaccgctgtcgcgtcatcggtgccgcctcgcagacctgctacgaagtgaacttcgacgatggctcctacagcgacaacctgtaccctgagagcatcacgagtagggactgtgtccagctgggacccccttccgagggggagctggtggagctccggtggactgacggcaacctctacaaggccaagttcatctcctccgtcaccagccacatctaccaggtggagtttgaggacgggtcccagctgacggtgaagcgtggggacatcttcaccctggaggaggagctgcccaagagggtccgctctcggctgtcactgagcacgggggcaccgcaggagcccgccttctcgggggaggaggccaaggccgccaagcgcccgcgtgtgggcaccccgcttgccacggaggactccgggcggagccaggactacgtggccttcgtggagagcctcctgcaggtgcagggccggcccggagcccccttctaggacagctggccgctcaggcgaccctcagcccggcggggaggccatggcatgccccgggcgttcgcttgctgtgaattcctgtcctcgtgtccccgacccccgagaggccacctccaagccgcgggtgccccctagggcgacaggagccagcgggacgccgcacgcggccccagactcagggagcagggccaggcgggctcgggggccggccaggggagcaccccactcaactactcagaattttaaaccatgtaagctctcttcttctcgaaaaggtgctactgcaatgccctactgagcaacctttgagattgtcacttctgtacataaaccacctttgtgaggctctttctataaatacatattgtttaaaaaaaagcaagaaaaaaaggaaaacaaaggaaaatatccccaaagttgttttctagatttgtggctttaagaaaaacaaaacaaaacaaacacattgtttttctcagaaccaggattctctgagaggtcagagcatctcgctgtttttttgttgttgttttaaaatattatgatttggctacagaccaggcagggaaagagacccggtaattggagggtgagcctcggggggggggcaggacgccccggtttcggcacagcccggtcactcacggcctcgctctcgcctcaccccggctcctgggctttgatggtctggtgccagtgcctgtgcccactctgtgcctgctgggaggaggcccaggctctctggtggccgcccctgtgcacctggccaggggaagcccgggggtctggggcctccctccgtctgcgcccacctttgcagaataaactctctcctggggtttgtctatctttgtttctctcacctgagagaaacgcaggtgttccagaggcttccttgcagacaaagcacccctgcacctcctatggctcaggatgagggaggcccccaggcccttctggttggtagtgagtgtggacagcttcccagctcttcgggtacaaccctgagcaggtcgggggacacagggccgaggcaggccttcggggcccctttcgcctgcttccgggcagggacgaggcctggtgtcctcgctccacccacccacgctgctgtcacctgaggggaatctgcttcttaggagtgggttgagctgatagagaaaaaacggccttcagcccaggctgggaagcgccttctccaggtgcctctccctcaccagctctgcacccctctggggagccttccccaccttagctgtctcctgccccagggagggatggaggagataatttgcttatattaaaaacaaaaaatggctgaggcaggagtttgggaccagcctgggctatatagcaagaccccatcactacaaattttttacaaattagctaggtgtggtggtgcgcacctgtggtcccagctactcgggaggctgtggtgggaggattgcttgagtccaggaggttgaggctgcagtcagctcagattgcaccactgcactccagcctgggcaacagagcgagaccctgtctccaaaaaaaaaaaaaagcaatgtttatattataaaagagtgtcctaacagtccccgggctagagaggactaaggaaaacagagagagtgttacgcaggagcaagcctttcatttccttggtgggggaggggggcggttgccctggagagggccggggtcggggaggttggggggtgtcagccaaaacgtggaggtgtccctctgcacgcagccctcgcccggcgtggcgctgacactgtattcttatgttgtttgaaaatgctatttatattgtaaagaagcgggcgggtgcccctgctgcccttgtcccttgggggtcacacccatcccctggtgggctcctgggcggcctgcgcagatgggccacagaagggcaggccggagctgcacactctccccacgaaggtatctctgtgtcttactctgtgcaaagacgcggcaaaacccagtgccctggtttttccccacccgagatgaaggatacgctgtattttttgcctaatgtccctgcctctaggttcataatgaattaaaggttcatgaacgctgcg

SEQ ID NO: 15 - protein, 2364 aa, Homo Sapiens
MTTTVATDYDNIEIQQQYSDVNNRWDVDDWDNENSSARLFERSRIKALADEREAVQKKTFTKWVNSHLARVSCRITDLYTDLRDGRMLIKLLEVLSGERLPKPTKGRMRIHCLENVDKALQFLKEQRVHLENMGSHDIVDGNHRLTLGLIWTIILRFQIQDISVETEDNKEKKSAKDALLLWCQMKTAGYPNVNIHNFTTSWRDGMAFNALIHKHRPDLIDFDKLKKSNAHYNLQNAFNLAEQHLGLTKLLDPEDISVDHPDEKSIITYVVTYYHYFSKMKALAVEGKRIGKVLDNAIETEKMIEKYESLASDLLEWIEQTIIILNNRKFANSLVGVQQQLQAFNTYRTVEKPPKFTEKGNLEVLLFTIQSKMRANNQKVYMPREGKLISDINKAWERLEKAEHERELALRNELIRQEKLEQLARRFDRKAAMRETWLSENQRLVSQDNFGFDLPAVEAATKKHEAIETDIAAYEERVQAVVAVARELEAENYHDIKRITARKDNVIRLWEYLLELLRARRQRLEMNLGLQKIFQEMLYIMDWMDEMKVLVLSQDYGKHLLGVEDLLQKHTLVEADIGIQAERVRGVNASAQKFATDGEGYKPCDPQVIRDRVAHMEFCYQELCQLAAERRARLEESRRLWKFFWEMAEEEGWIREKEKILSSDDYGKDLTSVMRLLSKHRAFEDEMSGRSGHFEQAIKEGEDMIAEEHFGSEKIRERIIYIREQWANLEQLSAIRKKRLEEASLLHQFQADADDIDAWMLDILKIVSSSDVGHDEYSTQSLVKKHKDVAEEIANYRPTLDTLHEQASALPQEHAESPDVRGRLSGIEERYKEVAELTRLRKQALQDTLALYKMFSEADACELWIDEKEQWLNNMQIPEKLEDLEVIQHRFESLEPEMNNQASRVAVVNQIARQLMHSGHPSEKEIKAQQDKLNTRWSQFRELVDRKKDALLSALSIQNYHLECNETKSWIREKTKVIESTQDLGNDLAGVMALQRKLTGMERDLVAIEAKLSDLQKEAEKLESEHPDQAQAILSRLAEISDVWEEMKTTLKNREASLGEASKLQQFLRDLDDFQSWLSRTQTAIASEDMPNTLTEAEKLLTQHENIKNEIDNYEEDYQKMRDMGEMVTQGQTDAQYMFLRQRLQALDTGWNELHKMWENRQNLLSQSHAYQQFLRDTKQAEAFLNNQEYVLAHTEMPTTLEGAEAAIKKQEDFMTTMDANEEKINAVVETGRRLVSDGNINSDRIQEKVDSIDDRHRKNRETASELLMRLKDNRDLQKFLQDCQELSLWINEKMLTAQDMSYDEARNLHSKWLKHQAFMAELASNKEWLDKIEKEGMQLIZEKPETEAVVKEKLTGLHKMWEVLESTTQTKAQRLFDANKAELFTQSCADLDKWLHGLESQIQSDDYGKHLTSVNILLKKQQMLENQMEVRKKEIEELQSQAQALSQEGKSTDEVDSKRLTVQTKFMELLEPLNERKHNLLASKEIHQFNRDVEDEILWVGERMPLATSTDHGHNLQTVQLLIKKNQTLQKEIQGHQPRIDDIFERSQNIVTDSSSLSAEAIRQRLADLKQLWGLLIEETEKRHRRLEEAHRAQQYYFDAAEAEAWMSEQELYMMSEEKAKDEQSAVSMLKKHQILEQAVEDYAETVHQLSKTSRALVADSHPESERISMRQSKVDKLYAGLKDLAEERRGKLDERHRLFQLNREVDDLEQWIAEREVVAGSHELGQDYEHVTMLQERFREFARDTGNIGQERVDTVNHLADELINSGHSDAATIAEWKDGLNEAWADLLELIDTRTQILAASYELHKFYHDAKEIFGRIQDKHKKLPEELGRDQNTVETLQRMHTTFEHDIQALGTQVRQLQEDAARLQAAYAGDKADDIQKRENEVLEAWKSLLDACESRRVRLVDTGDKFRFFSMVRDLMLWMEDVIRQIEAQEKPRDVSSVELLMNNHQGIKAEIDARNDSFTTCIELGKSLLARKHYASEEIKEKLLQLTEKRKEMIDKWEDRWEWLRLILEVHQFSRDASVAEAWLLGQEPYLSSREIGQSVDEVEKLIKRHEAFEKSAATWDERFSALERLTTLELLEVRRQQEEEERKRRPPSPEPSTKVSEEAESQQQWDTSKGEQVSQNGLPAEQGSPRMAETVDTSEMVNGATEQRTSSKESSPIPSPTSDRKAKTALPAQSAATLPARTQETPSAQMEGFLNRKHEWEAHNKKASSRSWHNVYCVINNQEMGFYKDAKTAASGIPYHSEVPVSLKEAVCEVALDYKKKKHVFKLRLNDGNEYLFQAKDDEEMNTWIQAISSAISSDKHEVSASTQSTPASSRAQTLPTSVVTITSESSPGKREKDKEKDKEKRFSLFGKKK

SEQ ID NO: 16 - DNA, 7561 bp, Homo Sapiens
gtgagctgaagcagggcagggcatcaactcacccaggaagtgcaaggggtttggggattttcctttcctagccaagggaaggcatgacagactgtacctggaaaaacaggacactcttgcccaaatactgcactttttgcacagtcttagcaactggcagaccaggagattctctcctgtgcctgattcattgggtcccacacccatagggccttgcttactgccagtgcagcagtctgagattaacaccccatccccgggagaactctaagaaggagctgatgtggaggagcagctgagacagttcaagatgacgaccacagtagccacagactatgacaacattgagatccagcagcagtacagtgatgtcaacaaccgctgggatgtcgacgactgggacaatgagaacagctctgcgcggctttttgagcggtcccgcatcaaggctctggcagatgagcgtgaagccgtgcagaagaagaccttcaccaagtgggtcaattcccaccttgcccgtgtgtcctgccggatcacagacctgtacactgaccttcgagatggacggatgctcatcaagctgctggaggtcctctctggagagaggctgcctaaacccaccaagggacgaatgcgcatccactgcttagagaatgtggacaaggcccttcagttcctgaaggagcagagagtccatcttgagaacatggggtcccatgacatcgtggatggaaaccaccggctgacccttggcctcatctggaccatcatcctgcgcttccagatccaggatatcagtgtggaaactgaagacaacaaagagaagaaatctgccaaggatgcattgctgttgtggtgccagatgaagacagctgggtaccccaatgtcaacattcacaatttcaccactagctggagggacggcatggccttcaatgcactgatacacaaacaccggcctgacctgatagattttgacaaactaaagaaatctaacgcacactacaacctgcagaatgcatttaatctggcagaacagcacctcggcctcactaaactgttggaccccgaagacatcagcgtggaccatcctgatgagaagtccataatcacttatgtggtgacttattaccactacttctctaagatgaaggccttagctgttgaaggaaaacgaattggaaaggtgcttgacaatgctattgaaacagaaaaaatgattgaaaagtatgaatcacttgcctctgaccttctggaatggattgaacaaaccatcatcattctgaacaatcgcaaatttgccaattcactggtcggggttcaacagcagcttcaggcattcaacacttaccgcactgtggagaaaccacccaaatttactgagaaggggaacttggaagtgctgctcttcaccattcagagcaagatgagggccaacaaccagaaggtctacatgccccgggaggggaagctcatctctgacatcaacaaggcctgggaaagactggaaaaagcggaacacgaaagagaactggctttgcggaatgagctcataagacaggagaaactggaacagctcgcccgcagatttgatcgcaaggcagctatgagggagacttggctgagcgaaaaccagcgtctggtgtctcaggacaactttgggtttgaccttcctgcagttgaggccgccacaaaaaagcacgaggccattgagacagacattgccgcatacgaggagcgtgtgcaggctgtggtagccgtggccagggagctcgaggccgagaattaccacgacatcaagcgcatcacagcgaggaaggacaatgtcatccggctctgggaatacctactggaactgctcagggcccggagacagcggctcgagatgaacctggggctgcagaagatattccaggaaatgctctacattatggactggatggatgaaatgaaggtgctagtattgtctcaagactatggcaaacacttacttggtgtggaagacctgttacagaagcacaccctggttgaagcagacattggcatccaggcagagcgggtgagaggtgtcaatgcctccgcccagaagttcgcaacagacggggaaggttacaagccctgtgacccccaggtgatccgagaccgcgtggcccacatggagttctgttatcaagagctttgccagctggcggctgagcgcagggcccgtctggaagagtcccgccgcctctggaagttcttctgggagatggcagaagaggaaggctggatacgggagaaggagaagatcctgtcctcggacgattacgggaaagacctgaccagcgtcatgcgcctgctcagcaagcaccgggcgttcgaggacgagatgagcggccgcagtggccactttgagcaggccatcaaggaaggcgaagacatgatcgcggaggagcacttcgggtcggagaagatccgtgagaggatcatttacatccgggagcagtgggccaacctagagcagctctcggccattcggaagaagcgcctggaggaggcctccctgctgcaccagttccaggcagatgctgatgacattgatgcctggatgctggacatcctcaagattgtctccagcagcgacgtgggccacgatgagtattccacacagtctctggtcaagaaacacaaggacgtggcggaagagatcgccaattacaggcccacccttgacacgctgcacgaacaagccagcgccctcccccaggagcatgccgagtctccagacgtgaggggcaggctgtcgggcatcgaggagcggtataaggaggtggcagagctgacgcggctgcggaagcaggcactccaggacactctggccctgtacaagatgttcagcgaggctgatgcctgtgagctctggatcgacgagaaggagcagtggctcaacaacatgcagatcccagagaagctggaggatctggaggtcatccagcacagatttgagagcctagaaccagaaatgaacaaccaggcttcccgggttgcagtggtgaaccagattgcacgccagctgatgcacagcggccacccaagtgagaaggaaatcaaagcccagcaggacaaactcaacacaaggtggagccagttcagagaactggttgacaggaagaaggatgccctcctgtctgccctgagcatccagaactaccacctcgagtgcaatgaaaccaaatcctggattcgggaaaagaccaaggtcatcgagtccacccaggacctgggcaatgacctggctggcgtcatggccctgcagcgcaagctgaccggcatggagcgggacttggtggccattgaggcaaagctgagtgacctgcagaaggaggcggagaagctggagtccgagcaccccgaccaggcccaggccatcctgtctcggctggccgagatcagcgacgtgtgggaggagatgaagaccaccctgaaaaaccgagaggcctccctgggagaggccagcaagctgcagcagttcctacgggacttggacgacttccagtcctggctctctaggacccagacagcgatcgcctcggaggacatgccaaacaccctgaccgaggctgagaagctgctcacgcagcacgagaacatcaagaatgagatcgacaactacgaggaggactaccagaagatgagggacatgggcgagatggtcacccaggggcagaccgatgcccagtacatgtttctgcggcagcggctgcaggccctggacactggatggaacgagctccacaagatgtgggagaacagacaaaatctcctatcccagtcacatgcctaccagcagttcctcagagacacgaagcaagccgaagcctttcttaacaaccaggagtatgttctggctcacactgaaatgcctaccaccttggaaggagctgaagcagcaattaaaaagcaagaggacttcatgaccaccatggacgccaatgaggagaagatcaatgctgtggtggagactggccggaggctggtgagcgatgggaacatcaactcagatcgcatccaggagaaggtggactctattgatgacagacataggaagaatcgtgagacagccagtgaacttttgatgaggttgaaggacaacagggatctacagaaattcctgcaagattgtcaagagctgtctctctggatcaatgagaagatgctcacagcccaggacatgtcttacgatgaagccagaaatctgcacagtaaatggttgaagcatcaagcatttatggcagaacttgcatccaacaaagaatggcttgacaaaatcgagaaggaaggaatgcagctcatttcagaaaagcctgagacggaagctgtggtgaaggagaaactcactggtttacataaaatgtgggaagtccttgaatccactacccagacaaaggcccagcggctctttgatgcaaacaaggccgaacttttcacccagagctgtgcagatctagacaaatggctgcacggcctggagagtcagattcagtctgatgactatggcaaacacctgaccagtgtcaatatcctgctgaaaaagcaacagatgctggagaatcagatggaagtgcggaagaaggagatcgaagagctccaaagccaagcccaggccctgagtcaggaagggaagagcaccgacgaggtagacagcaagcgcctcaccgtgcagaccaagttcatggagttgctggagcccttgaacgagaggaagcataacctgctggcctccaaagagatccatcagttcaacagggatgtggaggacgagatcttgtgggttggagagaggatgcctttggcaacttccacggatcatggccacaacctccagactgtgcagctgttaataaagaaaaatcagaccctccagaaagaaatccaggggcaccagcctcgcattgacgacatctttgagaggagccaaaacatcgtcactgacagcagcagcctcagcgctgaggccatcagacagaggcttgccgacctgaagcagctgtggggtctcctcattgaggagacagagaaacgccacaggcggctggaggaggcgcacagggcccagcagtactactttgacgctgctgaggccgaagcctggatgagcgagcaggagctgtacatgatgtcagaggagaaggccaaggatgagcagagtgctgtctccatgttgaagaagcaccagatcttagaacaagctgtggaggactatgcagagaccgtgcatcagctctccaagaccagccgggccctggtggccgacagccatcctgaaagtgagcgcattagcatgcggcagtccaaagtggataaactgtacgctggtctgaaagaccttgctgaagagagaagaggcaagctggatgagagacacaggttattccagctcaaccgggaggtggacgacctggagcagtggatcgctgagagggaggtggtcgcagggtcccatgaactgggacaggactatgagcatgtcacgatgttacaagaacgattccgggagtttgcccgagacaccgggaacattgggcaggagcgcgtggacacggtcaatcacctggcagatgagctcatcaactctggacattcagatgccgccaccatcgctgaatggaaggatggcctcaatgaagcctgggccgacctcctggagctcattgacacaagaacacagattcttgccgcttcctatgaactgcacaagttttaccacgatgccaaggagatctttgggcgtatacaggacaaacacaagaaactccctgaggagcttgggagagatcagaacacagtggagaccttacagagaatgcacactacatttgagcatgacatccaggctctgggcacacaggtgaggcagctgcaggaggatgcagcccgcctccaggcggcctatgcgggtgacaaggccgacgatatccagaagcgcgagaacgaggtcctggaagcctggaagtccctcctggacgcctgtgagagccgcagggtgcggctggtggacacaggggacaagttccgcttcttcagcatggtgcgcgacctcatgctctggatggaggatgtcatccggcagatcgaggcccaggagaagccaagggatgtatcatctgttgaactcttaatgaataatcatcaaggcatcaaagctgaaattgatgcacgtaatgacagtttcacaacctgcattgaacttgggaaatccctgttggcgagaaaacactatgcatctgaggagatcaaggaaaaattactgcagttgacggaaaagaggaaagaaatgatcgacaagtgggaagaccgatgggaatggttaagactgattctggaggtccatcagttctcaagagacgccagtgtggccgaggcctggctgcttggacaggagccgtacctatccagccgagagataggccagagcgtggacgaggtggagaagctcatcaagcgccacgaggcatttgaaaagtctgcagcaacctgggatgagaggttctctgccctggaaaggctgactacattggagttactggaagtgcgcagacagcaagaggaagaggagaggaagaggcggccgccttctcccgagccgagcacgaaggtttcagaggaagccgagtcccagcagcagtgggatacttcaaaaggagaacaagtttcccaaaacggtttgccagctgaacagggatctccacggatggcagaaacggtggacacaagcgaaatggtcaacggcgctacagaacaaaggacgagctctaaagagtccagccccatcccctccccgacctctgatcgtaaagccaagactgccctcccagcccagagtgccgccaccttaccagccagaacccaggagacaccttcggcccagatggaaggcttcctcaatcggaaacacgagtgggaggcccacaataagaaagcctcaagcaggtcctggcacaatgtttattgtgtcataaataaccaagaaatgggtttctacaaagatgcaaagactgctgcttctggaattccctaccacagcgaggtccctgtgagtttgaaagaagctgtctgcgaagtggcccttgattacaaaaagaagaaacacgtattcaagctaagactaaatgatggcaatgagtacctcttccaagccaaagacgatgaggaaatgaacacatggatccaggctatctcttccgccatctcctctgataaacacgaggtgtctgccagcacccagagcacgccagcatccagccgcgcgcagaccctccccaccagcgtcgtcaccatcaccagcgagtccagtcccggcaagcgggaaaaggacaaagagaaagacaaagagaagcggttcagcctttttggcaaaaagaaatgaactcctttccttcacctcctgcccttctcttaccttttcagtgaaattccagcatgcaagctcagaaccaacacattactctctgtgcctaatgttcctcaatgtggttgatttatttttttttttaatttatagagcatttcggggggggtgggg

SEQ ID NO: 17 - protein, 366 aa, Homo Sapiens
MQPPLDLKQILPFPLEPAPTLGLFSNYSTMDPVQKAVLSHTFGGPLLKTKRPVISCNICQIRFNSQSQAEAHYKGNRHARRVKGIEAAKTRGREPGVREPGDPAPPGSTPTNGDGVAPRPVSMENGLGPAPGSPEKQPGSPSPPSIPETGQGVTKGEGGTPAPASLPGGSKEEEEKAKRLLYCALCKVAVNSLSQLEAHNKGTKHKTILEARSGLGPIKAYPRLGPPTPGEPEAPAQDRTFHCEICNVKVNSEVQLKQHISSRRHRDGVAGKPNPLLSRHKKSRGAGELAGTLTFSKELPKSLAGGLLPSPLAVAAVMAAAAGSPLSLRPAPAAPLLQGPPITHPLLHPAPGPIRTAHGPILFSPY

SEQ ID NO: 18 - DNA, 2076 bp, Homo Sapiens
agagcgacgcggaaccccgggcgcctgggtccccagcatgatcctcggcagcctgagccgggcagggcccctgcctctgctacggcagcccccgatcatgcagcccccactggacctcaagcagatcctgcccttcccactcgagccagcccctacccttggcctcttcagcaactacagcaccatggaccctgtgcagaaggctgtgctctcccacacttttgggggacccttgctcaagaccaagcgacccgtcatttcctgtaatatctgtcaaatccgcttcaattctcagagccaggctgaggcgcactacaaaggtaatcgccacgcccgacgagtcaaaggcattgaggctgccaagaccagaggcagggagcctggcgtccgagaacctggagacccagctcccccaggcagcaccccaacaaatggggatggtgtagcaccccgtccaggtactaagcacaagacaattctggaggcccgaagtgggctcgggcccatcaaagcttaccctcggctggggcctcccaccccgggggaaccagaggctcctgcccaggaccgaactttccactgtgagatctgcaatgtcaaggtcaactcggaggtccaactgaaacagcacatctccagccggcggcaccgagacggcgtggccgggaagcccaacccactactgagccgtcacaagaagtctaggggcgccggggagctggcgggcacgctgactttctccaaggagctgcccaagtccctggcgggcggcctgctccccagccccctggcggtggctgcagtgatggcagcggcagcaggctcgccgctgtccctgcgcccggctccagccgcacctcttctccagggaccgccgatcactcaccctctgcttcacccggcccccggacccatccgaactgcgcacggacccatcctcttctccccgtactgacctcaaccctgaacccctcccattcaactccccacctccagccgggacccaggcgtccggactcccagcccgcccctcctcccggcactccctaaatgatctctccttccccccccccaccccgagatacggggttccaggaaaggggaggggtagcgggggaggggggcttcagaagggggggaacaccccagatctcagggaaccccgccccctgcctttccctctcccctagaaaagggggggccgtctcacccccgagcccccttggagacaccccccctcccaaaagccatgtccatccagcccttccccccaaacctagcacaaaacggggttcacaagccatggtcggggtccgggggggacagaaatggattttcttggcaataagcggactctgggactccggctccctaccccaaactgaagcgcttccgtgaacacccccgtcctccgtagggggaggggagcaggcgggatcctgggtccctcataagcactttggttttaccgcctgcaacctcactgtgcccgccccgcaccatgccctagccccaggtctagccgggcccattgcagggggcagcacttgggggcatctccggcacttgggtgggaccaaggagatgccaccatagacctttccctcgccttcttcctccctagtccgggttccattcttttcaccagcacccatcgcccaaggggtaccgaggggggcaaggggtgtccagtccaagcccacccccgcctcgccttccgcaaaactgtgagcaaaaagcaatagaagcctcgcccccgcccttccccttcgcaggattcgccgagtctgtagcctccccgattcaagttcctagacctcatggctgtcccctcccaccagtcacctccactgcacaactcgggcgggggtgtgacacctctcccccacccccgactccgtggtttccgtatcgtcaacccttcagccgccgacccgggaggggtctggcctacactggtcttccccttcccatcaactctttctgcttgacaatgtagcaacccaggccccccacccacggccctcccctttttcctctccctgacaataaagtctgaatttgttctgccctccg

SEQ ID NO: 19 - protein, 1212 aa, Homo Sapiens
MYKSLLDKAGLGSITSVRFLGDQQSVFVSKDLLKPIQDVNSLRLSLTDNQTVSKEFQALIVKHLDESHLLQGDKNLVGSEVRIYSLDPSTQWFSATVVHGNPSSKTLQVNCEEIPALKIVDPALIHVEVVHDNFVTCGNSTRIGAVKRKSSENNGSSVSKQAKSCSEVSPSMCPVQSVPTTVCKEILLGCTAATPSSNRQQNTPQAANSPPNIGAKLPQGCHKQSLPEEISSCLNTKSEVLRTKPDVCKAGLLSSKSSQVGAGDLKILSEPKGSCIQPKTNTDQESRLESTPQPVTGLTKECLVTKTSSKAELDNATAPELQKRLEHTASTPDGLSDKPEVEAGVTRLNSCSEKKVGPSDLGSQSQNLKETSVKVDHDSCCTRSSNKTQTPPARKSVLTDPDKLKKLQQSGEAFVQDDSCVNIVAQLPKCRECRLDSLRKDKDQQKDSPVFCRFFHFRRLQFNKHGVLRVEGFLTPNKYDSEAIGLWLPLTKNVVGTDLDTAKYILANIGDHFCQMVISEKEAMSTIEPHRQVAWKRAVKGVREMCDVCDTTIFNLHWVCPRCGFGVCVDCYRLKRKNCQQGAAYKTFSWIRCVKSQIHEPENLMPTQIIPGKALYDVGDIVHSVRAKWGIKANCPCSNRQFKLFSKPALKEDLKQASLSGEKPSLGTMVQQSSPVLEPAAVCGEAPSKPASNVKPICPANTSPLNWLADLTSGNVNKENKEKQLTMPILKNEIKCLPPLPPLNKSSTVLHTFNSTILTPVSNNNSGFLRNLLNSSTGKTENGLKNTPKILDDIFASLVQNKTTSDLSKRPQGLTIKPSILGFDTPHYWLCDNRLLCLQDPNNKSNWNVFRECWKQGQPVMVSGVHHKLNSELWKPESFRKEFGEQEVDLVNCRTNEIITGATVGDFWDGFEDVPNRLKNEKEPMVLKLKDWPPGEDFRDMMPSRFDDLMANIPLPEYTRRDGKLNLASRLPNYFVRPDLGPKMYNAYGLITPEDRKYGTTNLHLDVSDAANVMVYVGIPKGQCEQEEEVLKTIQDGDSDELTIKRFIEGKEKPGALWHIYAAKDTEKIREFLKKVSEEQGQENPADHDPIHDQSWYLDRSLRKRLHQEYGVQGWAIVQFLGDVVFIPAGAPHQVHNLYSCIKVAEDFVSPEHVKHCFWLTQEFRYLSQTHTNHEDKLQVKNVIYHAVKDAVAMLKAVNPVLANLNLPAHWK

SEQ ID NO: 20 - DNA, 4309 bp, Homo Sapiens
ggagagcatttttagtagaacataatttggttttagctgaacgaaagtcacctgaaatttctgaacgaattgtacagtggcctgcaataacgtacaaacctctgttggacaaagctggtttgggatccataacttctgttcgctttctgggagatcaacaaagagtatttctttctaaagaccttttgaagcctatacaggatgtaaacagtcttcgactttctcttacggataatcagattgtcagtaaagaatttcaagctttgattgtgaagcatttagatgaaagccatcttttaaaaggtgacaaaaacttagttggttcagaagtaaaaatttatagcttggacccatctactcagtggttttcagcaaccgttgtaaatggaaacccagcatcaaaaactcttcaagtcaactgtgaggagattccagcactgaaaattgttgatccgtcactgattcatgttgaagttgtacacgataaccttgtgacatgtggtaattctgcaagaattggagctgtaaaacgcaagtcttctgagaataatggaaccctggtttccaaacaagcaaaatcttgctctgaggcctctcccagtatgtgtcctgtgcagtctgtacctacaacagtttttaaggagatactgcttggctgtactgcagcaactccacctagtaaggacccaagacagcaaagtactccccaggctgccaactctccacctaaccttggagcaaaaattcctcaaggatgtcataaacaaagtttaccagaggaaatttcttcctgtctaaatacaaagtctgaagctctgagaacaaaaccagatgtctgcaaagcagggttgctctcaaagtcctctcagattggaactggagacttgaaaattctgactgagccaaaaggcagctgtactcagcctaagacaaacactgatcaggaaaacagattggagtctgttccacaagcattgactggccttcctaaggagtgcttacctacaaaggcttcttctaaggcagaattggaaattgccaatcctcctgaactgcagaagcacctagaacatgcaccttccccatcggatgtttcaaatgcaccagaagtgaaagcaggtgtcaatagtgatagccctaataactgttcaggaaaaaaggtagaaccttcagctttagcttgccgatcacagaatttaaaggaatcttcagtaaaagtagataatgaaagctgttgttcaagaagcaacaataaaatccagaatgccccatccaggaagtcggttttgacagacccagctaaactcaaaaagctgcaacagagtggcgaggccttcgtacaggatgattcttgtgtgaacatcgtggcacagttgcctaaatgccgagagtgtcgcttggacagtctccgcaaggataaggagcaacagaaggactcacctgtgttttgccgcttctttcacttcaggaggttacaattcaacaaacatggtgtgttgcgggtagaaggcttcttaacaccaaacaagtatgacaatgaagcaattggcttgtggttacctttaaccaaaaacgttgtggggattgatttggacacagcaaagtacatcttggccaacattggagaccacttctgtcaaatggtgatttctgaaaaggaagctatgtcaactattgagccacacagacaggttgcttggaagcgagctgtcaaaggtgttcgagaaatgtgtgatgtgtgcgacaccaccatcttcaacctgcactgggtgtgtcctcggtgtgggtttggagtatgtgtggactgctaccggatgaagagaaagaattgccaacagggtgctgcttacaagactttctcttggctaaaatgtgtgaagagtcagatacatgaaccagagaacttaatgcccacacagatcattcctggaaaagcactctatgatgttggagacattgttcattctgtaagagcgaaatggggaataaaggcaaactgcccttgttcaaacaggcaattcaaactcttttcaaagccagcctcaaaggaagacctaaaacagacttctttagctggagaaaaaccgactcttggtgcagtgctccagcagaatccctcagtgttggagccagcagctgtgggtggggaagcagcctccaagccagccggcagcatgaagcctgcctgtccagccagcacatctcctctaaactggctggccgacctaaccagcgggaatgtcaacaaggaaaacaaggaaaaacaaccaacaatgccaattttaaagaatgaaatcaaatgccttccacccctcccacctttaagcaaatccagcacagtcctccatacgtttaacagcacaattttgacacccgtaagcaacaacaattctggtttcctccggaatctcttgaattcttctacaggaaagacagaaaatggactcaagaatacaccaaaaatccttgatgacatctttgcctctttggtgcaaaataagacgacttctgatttatctaagaggcctcaaggactaaccatcaagcccagcattctgggctttgacactcctcactattggctttgtgataatcgcttgctgtgcttgcaagaccccaacaataagagcaactggaatgtgtttagggagtgctggaaacaagggcagccagtgatggtgtctggagtgcatcataaattgaactctgaactttggaaacctgaatccttcaggaaagagtttggtgagcaggaagtagacctagttaattgtaggaccaatgaaatcatcacaggagccacagtaggagacttctgggatggatttgaagatgttccaaatcgtttgaaaaatgaaaaagaaccaatggtgttgaaacttaaggactggccaccaggagaagattttagagatatgatgccttccaggtttgatgatctgatggccaacattccactgcccgagtacacaaggcgagatggcaaactgaatttggcctctaggctgccaaactactttgttcggccagatctgggccccaagatgtataatgcttatggattaatcactcctgaagatcggaaatatggaacaacaaatcttcacttagatgtatctgatgcagctaatgtcatggtctatgtgggaattcccaaaggacagtgtgagcaagaagaagaagtccttaagaccatccaagatggagattctgacgaactcacaataaagcgatttattgaaggaaaagagaagccaggagcactgtggcacatatatgctgcaaaggacacggagaagataagggaatttcttaaaaaggtatcagaagagcaaggtcaagaaaacccagcagaccacgatcctattcatgatcaaagctggtatttagaccgatcattaagaaaacgtcttcatcaagagtatggagttcaaggctgggctattgtacagtttcttggggatgtggtgtttatcccggcaggagctccacatcaggttcataacttatatagctgcatcaaagtggctgaagattttgtttctccagagcatgttaaacactgcttctggcttactcaggaattccgatatctgtcacagactcataccaatcacgaagataaattacaggtgaagaatgttatctaccatgcagtgaaagatgcagttgctatgctgaaagccagtgaatccagttttggcaaaccttaatctccctgcacattggaaatgaattacaggcagctgttcaaactcttcaggcaggattcctgtggactttgagattcatgttacctcatcttcttttttaaactgtacccaacttgtgagggtactctgtctaatgtatatttctagtgtttacagacagtaaatgtgtatatgtagtaactatttacagaacatgcatccttaaactgtgacttctcacctagtgcagaacttttaccaggctgtaaaagcaaaacctcgtatcagctctggaacaatacctgcagttattcttcagctgtttggacaacttagattgggtttataactattaggaatcactgcacagtttatttgggttgtgttttgtgtctgagtcccctccctcatcccttagggtccagaagagcaatggaggaagtgacagctaatgttgcagttcttattgtatggcataggactggcattatatagcagaaatcaactactgtacaatttcttggggttaaccatctttagttaaatggaattttaatttaaatgacgctttgctaattttaagtgttaagcattttgcattaaaatattcatataat

SEQ ID NO: 21 - protein, 68 aa, Homo Sapiens
MKAGGGMAGSVSGHSESLASLSRSPQTKAGQKLQHKNYPVCVLYIFITKFNKQKPLLNQVILSSVKRN

SEQ ID NO: 22 - DNA, 2026 bp, Homo Sapiens
cagaagactacattagtgagatgtaagaattattaaatattccatttccgctttggctacaattatgaagaagttgaaggtacttcttttagaccaccagtaaataatcctccttcaaaaaataaaaataaaagaaaaaggaaaatcattcaggaagaaatgacctgtctaaaaaaacctaaggaagaataataatataagaaaggaaatttaaaaacattccacaagaagaaaaattattgtttatactcctacttatggttatatcttatattctctattcaagtgacctgtcttttaaaaaggcagtgctgtcttacctcttgctagtgggttaaatgttttcaaaaattatagcagtagtagaagttttgtataaaatttgtccttatttgttaattgtatataaatgttaattatttgatacgaatgttatgcatttagtatgcacattgaagtctaaactgtagaagagtctaaaacaagttctctttttgcagattcacatactaatggtttaattctgtgctctgtttaaagtactattataactagagtagatctgaatgaggataaccctaaaatcatgaggaatggaagaatggaccttgaaactacctaggcttttatgcatggcacctctttataatgaagacactttttaaagtttttgtttttgtttcaattaccgctagatttttttttctctttttttaaaatccattttactggaaagttggccagcagagggagtagaaattattaaaattctagtgtttggattgggcccttctctaacagtacatactcattcccaaagcaatccaaaaacaaaatgtgaaccatttgggtttcaaatgttaagaacactaaatagcatgatttaaaaaatgaaaaatgctaacacccaagaaaagaagatattaagtgccttttaacaactcctagagtacaaaatgagtacatcataatgctggctcttctactaatgaaccatcgagtgatattgaataaattatttatcttctcagtttccttatctgtaaattacaatattagactaagtaagtttttccaactcttcactaccaattaccttaggcttttataatgctccgcctacttcagtcccatgtttcagaagcttttgtctattttttaaactcattgattaaataatgattaatgcattctccacattttaatattgcaaaggcccattggagtttctgaagtggctccacagaattgaaataatttcaaataactgtaaaggaactgaaaatcttcacagagatgaagtggggtttccattaggtgctttgaaatttgataacaaatcatcaacttccactggtcaatatatagattttgggtgtctgaggccccaagattagatgccactaatctccaaagattccctccaattatgaaatattttaatgtctacttttagagagcactagccagtatatgaccatgtgattaatttcttttcacactagataaaattacctggttcaaaagtggtttttgtttattaaatttggtaataaatatatataatacacagacaggatagtttttatgctgaagtttttggccagctttagtttgaggactccttgataagcttgctaaactttcagagtgccctgagacacttccagccatccctcctcctgccttcattggggcagacttgcattgcagtctgacagtaattttttttctgattgagaattatgtaaattcaatacaatgtcagtttttaaaagtcaaagttagatcaagagaatatttcagagttttggtttacacatcaagaaacagacacacatacctaggaaagatttacacaatagataatcatcttaatgtgaaagatatttgaagtattaattttaatatattaaatatgatttctgttatagtcttctgtatggaattttgtcacttaagatgagctgcaaataaataataccttcaatggaaaaaaaaaaaaaaaaaaaaaaaaaaaaaaaaa

SEQ ID NO: 23 - protein, 275 aa, Homo Sapiens
MGNFRGHALPGTFFFIIGLWWCTKSILKYICKKQKRTCYLGSKTLFYRLEILEGITIVGMALTGMAGEQFIPGGPHLMLYDYKQGHWNQLLGWHHFTMYFFFGLLGVADILCFTISSLPVSLTKLMLSNALFVEAFIFYNHTHGREMLDIFVHQLLVLVVFLTGLVAFLEFLVRNNVLLELLRSSLILLQGSWFFQIGFVLYPPSGGPAWDLMDHENILFLTICFCWHYAVTIVIVGMNYAFITWLVKSRLKRLCSSEVGLLKNAEREQESEEEM

SEQ ID NO: 24 - DNA, 1564 bp, Homo Sapiens
gaagcacatctggacagctgtgcggcctccttgcgggccgacgtcagccgagcacgtcccccacgtcctctccttctcgccacttattatttattcgttttcccaaagaagcgactagggacccaagtttaaaaattcctccccccactcaatgcgagacgtggccagatcccatccaacacacggtttaattttcatggggctctgggatcaaaagaacagaaacagcaacaacaaaagcccagccgctgtctgattttaagctggcaaagtgggaaaaataaagtgttgagtaaacagaccaagttggatcatggggaatttcagaggtcatgccctccctggaaccttcttttttattattggtctttggtggtgtacaaagagtattctgaagtatatctgcaaaaagcaaaagcgaacctgctatcttggttccaaaacattattctatcgattggaaattttggagggaattacaatagttggcatggctttaactggcatggctggggagcagtttattcctggagggccccatctgatgttatatgactataaacaaggtcactggaatcaactcctgggctggcatcatttcaccatgtatttcttctttgggctgttgggtgtggcagatatcttatgtttcaccatcagttcacttcctgtgtccttaaccaagttaatgttgtcaaatgccttatttgtggaggcctttatcttctacaaccacactcatggccgggaaatgctggacatctttgtgcaccagctgctggttttggtcgtctttctgacaggcctcgttgccttcctagagttccttgttcggaacaatgtacttctggagctattgcggtcaagtctcattctgcttcaggggagctggttctttcagattggatttgtcctgtatccccccagtggaggtcctgcatgggatctgatggatcatgaaaatattttgtttctcaccatatgcttttgttggcattatgcagtaaccattgtcatcgttggaatgaattatgctttcattacctggttggttaaatctagacttaagaggctctgctcctcagaagttggacttctgaaaaatgctgaacgagaacaagaatcagaagaagaaatgtgactttgatgagcttccagtttttctagataaaccttttcttttttacattgttcttggttttgtttctcgatcttttgtttggagaacagctggctaaggatgactctaagtgtactgtttgcatttccaatttggttaaagtatttgaatttaaatattttctttttagctttgaaaatattttgggtgatactttcattttgcacatcatgcacatcatggtattcaggggctagagtgatttttttccagattatctaaagttggatgcccacactatgaaagaaatatttgttttatttgccttatagatatgctcaaggttactgggcttgctactatttgtaactccttgaccatggaattatacttgtttatcttgttgctgcaatgagaaataaatgaatgtatgtattttggtgc

SEQ ID NO: 25 - protein, 232 aa, Homo Sapiens
MPSLWDRFSSSSTSSSPSSLPRTPTPDRPPRSAWGSATREEGFDRSTSLESSDCESLDSSNSGFGPEEDTAYLDGVSLPDFELLSDPEDEHLCANLMQLLQESLAQARLGSRRPARLLMPSQLVSQVGKELLRLAYSEPCGLRGALLDVCVEQGKSCHSVGQLALDPSLVPTFQLTLVLRLDSRLWPKIQGLFSSANSPFLPGFSQSLTLSTGFRVIKKKLYSSEQLLIEEC

SEQ ID NO: 26 - DNA, 1760 bp, Homo Sapiens
gcagcaggccaagggggaggtgcgagcgtggacctgggacgggtctgggcggctctcggtggttggcacgggttcgcacacccattcaagcggcaggacgcacttgtcttagcagttctcgctgaccgcgctagctgcggcttctacgctccggcactctgagttcatcagcaaacgccctggcgtctgtcctcaccatgcctagcctttgggaccgcttctcgtcgtcgtccacctcctcttcgccctcgtccttgccccgaactcccaccccagatcggccgccgcgctcagcctgggggtcggcgacccgggaggaggggtttgaccgctccacgagcctggagagctcggactgcgagtccctggacagcagcaacagtggcttcgggccggaggaagacacggcttacctggatggggtgtcgttgcccgacttcgagctgctcagtgaccctgaggatgaacacttgtgtgccaacctgatgcagctgctgcaggagagcctggcccaggcgcggctgggctctcgacgccctgcgcgcctgctgatgcctagccagttggtaagccaggtgggcaaagaactactgcgcctggcctacagcgagccgtgcggcctgcggggggcgctgctggacgtctgcgtggagcagggcaagagctgccacagcgtgggccagctggcactcgaccccagcctggtgcccaccttccagctgaccctcgtgctgcgcctggactcacgactctggcccaagatccaggggctgtttagctccgccaactctcccttcctccctggcttcagccagtccctgacgctgagcactggcttccgagtcatcaagaagaagctgtacagctcggaacagctgctcattgaggagtgttgaacttcaacctgagggggccgacagtgccctccaagacagagacgactgaacttttggggtggagactagaggcaggagctgagggactgattccagtggttggaaaactgaggcagccacctaaggtggaggtgggggaatagtgtttcccaggaagctcattgagttgtgtgcgggtggctgtgcattggggacacatacccctcagtactgtagcatggaacaaaggcttaggggccaacaaggcttccagctggatgtgtgtgtagcatgtaccttattatttttgttactgacagttaacagtggtgtgacatccagagagcagctgggctgctcccgccccagcctggcccagggtgaaggaagaggcacgtgctcctcagagcagccggagggaggggggaggtcggaggtcgtggaggtggtttgtgtatcttactggtctgaagggaccaagtgtgtttgttgtttgttttgtatcttgtttttctgatcggagcatcactactgacctgttgtaggcagctatcttacagacgcatgaatgtaagagtaggaaggggtgggtgtcagggatcacttgggatctttgacacttgaaaaattacacctggcagctgcgtttaagccttcccccatcgtgtactgcagagttgagctggcaggggaggggctgagagggtgggggctggaacccctccccgggaggagtgccatctgggtcttccatctagaactgtttacatgaagataagatactcactgttcatgaatacacttgatgttcaagtattaagacctatgcaatattttttacttttctaataaacatgtttgttaaaacaaaaaaaaaaaaaaaaa

SEQ ID NO: 27 - protein, 616 aa, Homo Sapiens
GGPGGPECPMRTPQLALLQVFFLVFPDGVRPQPSSSPSGAVPTSLELQRGTDGGTLQSPSEATATRPAVPGLPTVVPTLVTPSAPGNRTVDLFPVLPICVCDLTPGACDINCCCDRDCYLLHPRTVFSFCLPGSVRSSSWVCVDNSVIFRSNSPFPSRVFMDSNGIRQFCVHVNNSNLNYFQKLQKVNATNFQALAAEFGGESFTSTFQTQSPPSFYRAGDPILTYFPKWSVISLLRQPAGVGAGGLCAESNPAGFLESKSTTCTRFFKNLASSCTLDSALNAASYYNFTVLKVPRSMTDPQNMEFQVPVILTSQANAPLLAGNTCQNVVSQVTYEIETNGTFGIQKVSVSLGQTNLTVEPGASLQQHFILRFRAFQQSTAASLTSPRSGNPGYIVGKPLLALTDDISYSMTLLQSQGNGSCSVKRHEVQFGVNAISGCKLRLKKADCSHLQQEIYQTLHGRPRPEYVAIFGNADPAQKGGWTRILNRHCSISAINCTSCCLIPVSLEIQVLWAYVGLLSNPQAQVSGVRFLYQCQSIQDSQQVTEVSLTTLVNFVDITQKPQPPRGQPKMDWKWPFDFFPFKVAFSRGVFSQKCSVSPILILCLLLLGVLNLETM

SEQ ID NO: 28 - DNA, 2535 bp, Homo Sapiens
ggggggacccggaggccctgaatgccccatgcgcaccccacagctcgcgctcctgcaagtgttctttctggtgttccccgatggcgtccggcctcagccctcttcctccccatcaggggcagtgcccacgtctttggagctgcagcgagggacggatggcggaaccctccagtccccttcagaggcgactgcaactcgcccggccgtgcctggactccctacagtggtccctactctcgtgactccctcggcccctgggaataggactgtggacctcttcccagtcttaccgatctgtgtctgtgacttgactcctggagcctgcgatataaattgctgctgcgacagggactgctatcttctccatccgaggacagttttctccttctgccttccaggcagcgtaaggtcttcaagctgggtttgtgtagacaactctgttatcttcaggagtaattccccgtttccttcaagagttttcatggattctaatggaatcaggcagttttgtgtccatgtgaacaactcaaacttaaactatttccagaagcttcaaaaggtcaatgcaaccaacttccaggccctggctgcagagtttggaggcgaatcattcacttcaacattccaaactcaatcaccaccatctttttacagggctggggaccccattcttacttacttccccaagtggtctgtaataagcttgctgagacaacctgcaggagttggagctgggggactctgtgctgaaagcaatcctgcaggtttcctagagagtaaaagtacaacttgcactcgttttttcaagaacctggctagtagctgtaccttggattcagccctcaatgctgcctcttactataacttcacagtcttaaaggttccaagaagcatgactgatccacagaatatggagttccaggttcctgtaatacttacctcacaggctaatgctcctctgttggctggaaacacttgtcagaatgtagtttctcaggtcacctatgagatagagaccaatgggacttttggaatccagaaagtttctgtcagtttgggacaaaccaacctgactgttgagccaggcgcttccttacagcaacacttcatccttcgcttcagggcttttcaacagagcacagctgcttctctcaccagtcctagaagtgggaatcctggctatatagttgggaagccactcttggctctgactgatgatataagttactcaatgaccctcttacagagccagggtaatggaagttgctctgttaaaagacatgaagtgcagtttggagtgaatgcaatatctggatgcaagctcaggttgaagaaggcagactgcagccacttgcagcaggagatttatcagactcttcatggaaggcccagaccagagtatgttgccatctttggtaatgctgacccagcccagaaaggagggtggaccaggatcctcaacaggcactgcagcatttcagctataaactgtacttcctgctgtctcataccagtttccctggagatccaggtattgtgggcatatgtaggtctcctgtccaacccgcaagctcaagtatcaggagttcgattcctataccagtgccagtctatacaggattctcagcaagttacagaagtatctttgacaactcttgtgaactttgtggacattacccagaagccacagcctccaaggggccaacccaaaatggactggaaatggccattcgacttctttcccttcaaagtggcattcagcagaggagtattctctcaaaaatgctcagtctctcccatccttatcctgtgcctcttactacttggagttctcaacctagagactatgtgaagaaaagaaaataatcagatttcagttttccctatgagaaactctgaggcagccacttatcttggctaaatagaacctcacctgctcatgaccagagagcatttaggataatagaggacctaactgaaggaatccttgtatatgaaaggagttattttagaaaagcaataaaaatattttattcatcatagctctctgctttgggctctgcaggccaccagatacacatgaggcccctacttctcaagctgggaaggccaagagccttccttcagcctttctggttatgttacacctagctgaatgtttacaaggtctggatccatcagccctcaggcacagttgggccaagcagaaagagagaaactcttctgctgtcaccttgaatgaactcaggaatagcttccctctggactgtagaggagctaactgtttggaacagaaaactgctggctgttgattttgtctggttcctttgccaacatctgggcacaccctttgcccagacacgagtggggaaagcagttctttctcctcagtttccaaagtaaatggggaatcccagctttcttttctactagcaaatgaccctaccatttatttctgcctttttcttccgttcattgtgaggaaaaataaaactggttgagagctttgttgtaccaaaaaaaaaaaaaaaaaaa

SEQ ID NO: 29 - protein, 437 aa, Homo Sapiens
RSHFICDLDFFVLHYIFIDFVINMVLGKVKSLTISFDCLNDSNVPVYSSGDTVSGRVNLEVTGEIRVKSLKIHARGHAKVRWTESRNAGSNTAYTQNYTEEVEYFNHKDILIGHERDDDNSEEGFHTIHSGRHEYAFSFELPQTPLATSFEGRHGSVRYWVKAELHRPWLLPVKLKKEFTVFEHIDINTPSLLSPQAGTKEKTLCCWFCTSGPISLSAKIERKGYTPGESIQIFAEIENCSSRMVVPKAAIYQTQAFYAKGKMKEVKQLVANLRGESLSSGKTETWNGKLLKIPPVSPSILDCSIIRVEYSLMVYVDIPGAMDLFLNLPLVIGTIPLHPFGSRTSSVSSQCSMNMNWLSLSLPERPEAPPSYAEVVTEEQRRNNLAPVSACDDFERALQGPLFAYIQEFRFLPPPLYSEIDPNPDQSADDRPSCPSR

SEQ ID NO: 30 - DNA, 4131 bp, Homo Sapiens
gaccactgagacgagcgggagcgcggagcagcagcctctgctgccctgactttttaagaaatctcaatgaactatttgtagagaatcactgatccggcctgcaagcattttgcacggcaaaaatatcgatcagtgttaagtgaagatcacattttatatgcgatcttgacttttttgtcttacattatatttttatagattttgttataaacatggtgctgggaaaggtgaagagtttgacaataagctttgactgtcttaatgacagcaatgtccctgtgtattctagtggggataccgtctcaggaagggtaaatttagaagttactggggaaatcagagtaaaatctcttaaaattcatgcaagaggacatgcgaaagtacgctggactgaatctagaaacgccggctccaatactgcctatacacagaattacactgaagaagtagagtatttcaaccataaagacatcttaattgggcacgaaagagatgatgataattccgaagaaggcttccacactattcattcaggaaggcatgaatatgcattcagcttcgagcttccacagacaccactcgctacctcattcgaaggccgacatggcagtgtgcgctattgggtgaaagccgaattgcacaggccttggctactaccagtaaaattaaagaaggaatttacagtctttgagcatatagatatcaacactccttcattactgtcaccccaagcaggcacaaaagaaaagacactctgttgctggttctgtacctcaggcccaatatccttaagtgccaaaattgaaaggaagggctataccccaggtgaatcaattcagatatttgctgagattgagaactgctcttcccgaatggtggtgccaaaggcagccatttaccaaacacaggccttctatgccaaagggaaaatgaaggaagtaaaacagcttgtggctaacttgcgtggggaatccttatcatctggaaagacagagacgtggaatggcaagttgctgaaaattccaccagtttctccctctatcctcgactgtagtataatccgcgtggaatattcactaatggtatatgtggatattcctggagctatggatttatttcttaatttgccacttgtcatcggtaccattcctctacatccatttggtagcagaacctcaagtgtaagcagtcagtgtagcatgaatatgaactggctcagtttatcacttcctgaaagacctgaagcaccacccagctatgcagaagtggtaacagaggaacaaaggcggaacaatcttgcaccagtgagtgcttgtgatgactttgagagagcccttcaaggaccactgtttgcatatatccaggagtttcgattcttgcctccacctctttattcagagattgatccaaatcctgatcagtcagcagatgatagaccatcctgcccctctcgttgaaggaacacttggttgaatcaagttgatgtgggttccgaactgtatctcttccggctgaggacagagaagtatcttggagacacgtttcagaggaagtggaattacttttgcccagaaaaatggcgaatacatgaaacaaccagtgatcatgctttagaagcctacagcaacattctgagactgctccaacatgcttgaagatctaagcttttctcttttaaaactggcacatactcagagcagtcttcttagcctatggtcgtacgtgtcaagacatcacgttgtaaagagggatgatttccttcttttgatttgaaaatttgcacatgctcaatgcttacattgtgcggttcgacgtcactacagcttctttttttttttttttttttttctatttttgccagactcttgatactcttaaaacttgtttgtggtcagcacaacaaggaacaaaacaaagctttgaaaaaactttaacatgaaaaaacgcactgacatttttttttatttaatatagcctggactttacctgcgtatgcacatgctcagaattgtctactaggctgactatgtatcacctcttcagcttggatccaattgtggatttatttacaaacatcaaatgccttcaagccaatcctttttgctgtatgttttgcagcctactgtagtagatacgcaacagataatgtgggaaaaaaagagataagaggaggaagctaataagagactgtcaagattgtataccttcttggtttcttttaagaatttgttgcctttctactattacagcaaagcagcattttgttactgactgcctaaaatcacttaatctcaggtgaacgcatcacttgccaaactgttggaatgctatttgtgttttgttgcactgtttttttcgtttgtttgtttgtttatttggttggctttttggagagggaaatttggaaacgggacatacacaaaagttacacacccacattccctttttatcatgacatacaagaagaaactagcagagctaagaatggagtgaagaaaggcagtatggcaggcaccagcaaagagttgagggctgttgctcttaaaaattattttttttattattattttgaaagtatggaagttttccattcactggggaaaggagggaaaagtgcatttatttttatacagagttacttaattacctccaaaacacatatgttggaaatcgcttttgctggtgcaaagtatattaatgagcaggaatacatacattgaggttatgaatagagagctcaatttgtacctttgctgtcttgctcaagcttggtatggcatgaaaactcgactttattccaaaagtaacttcaaaatttaaaatactagaacgtttgctgcgataaatcttttggatttttgtgtttttctaatgagaatactgtttttcattacctaaagaacaatttgctaaacatgagaaatcactcactttgattatgtatagattacataggaagaacaatcacatcagtaagttatagtttatattaaaggtaattttctgttggctcataacaaatataccagcattcatgatagcatttcagcattttccaaggtaccaagtgtacttattttgttgttgttgttgttgttgtattttagaaggaattcagctctgatgtttttaaagaaaaccagcatctctgatgttgcaacatacgtgtaaaatgggtgttacatctatcctgccatttaaccccacagttaataaagtggctgaaaataatagtagctctggcttggtgcttgacctggttaaatactgtcttaaagctcatacaaaacaaataggcttttccataagtggcctttaagaaaacatggaagacaattcatgtttgacaaatgctgacagggtgaagaaagcccagtgtaaaaatgaatcgcgttttaagtgattcggttaaagagtttgggctcccgtagcaaactaatactagataataaggaaatgggggtgaaatatttttttattgttgaatcattttgtgaatgtccccctcaaaaaaagctaatggaatatttggcataaagggcatttggtggttttatttttgtttgagggggattgtcagaaaatcccttttctctcttacgtctaactgactagggaacaattgttgatatgcatagcattggaatacttgtcattatatactcttacaaataacacatgaagcaagaatgaccaatattctgataattggcactggatcacaaaatgtgataaaactttaaatgtataaaactttatcaaataaagttttattttcccctttaaaatgtatttctttagaggcattacttttttaaaaatattggtcaattcctgacataagatgtgaggttcacagttgtattccagtattcaagatagattcctgatttttcaattaggaaaagtaaaatccaaaatgttagcaaaacaaagtgcaatattaaatgtttgctttatagattatattctatggctgtttgtaatttctctttttttccttttttatttggtgctgaatatgtccttgtaggctctgttttaagaaaacaatatgtgggaaatgatttaatttttcctattgctcttccttgtggaaaataaagtgttttgtttttttctgttttgtat

SEQ ID NO: 31 - protein, 314 aa, Homo Sapiens
MLGKGGKRKFDEHEDGLEGKIVSPCDGPSKVSYTLQRQTIFNISLMKLYNHRPLTEPSLQKTVLINNMLRRIQEELKQEGSLRPMFTPSSQPTTEPSDSYREAPPAFSHLASPSSHPCDLGSTTPLEACLTPASLLEDDDDTFCTSQAMQPTAPTKLSPPALLPEKDSFSSALDEIEELCPTSTSTEAATAATDSVKGTSSEAGTQKLDGPQESRADDSKLMDSLPGNFEITTSTGFLTDLTLDDILFADIDTSMYDFDPCTSSSGTASKMAPVSADDLLKTLAPYSSQPVTPSQPFKMDLTELDHIMEVLVGS

SEQ ID NO: 32 - DNA, 5544 bp, Homo Sapiens
ctcctgcacggcgagtgctggagcacgagctaccgctcgctcggtcagggcgccccctccgcccgcctcctgcttcctcctccgctgcctgccgccgccgcctccaccattgtataatgctcggggcgcgcaggcagagaacggcggagtcttagcttcagcctcgcctgctgcccgctccccggcgccaccctcgggcccctggagcggggcactccgcatggagcgggagtagctgaggagtgggcggaaacccctcctgatgcgttagttcccaggtggagctgcatgtgatatatgttgggtaaaggaggaaaacggaagtttgatgagcatgaagatgggctggaaggcaaaatcgtgtctccctgtgacggtccatccaaggtgtcttacaccttacagcgccagactatcttcaacatttcccttatgaaactctataaccacaggcccctgacagagcccagcttgcaaaagaccgttttaattaacaacatgttgaggcggatccaggaggaactcaaacaggaaggcagcctgaggcccatgttcaccccctcctcccagcccaccaccgagcccagcgacagctaccgagaggccccgccggccttcagccacctggcgtccccgtcctcccacccctgcgacctcggaagcactacgcccctggaggcctgcctcaccccggcctcactgctcgaggacgacgatgacacgttttgcacctcccaggccatgcagcccacggctcccaccaaactgtcacctccagccctcttgccagaaaaggacagtttctcctctgccttggacgagatcgaggagctctgtcccacatctacctccacagaggcggccacggctgcgactgacagtgtgaaagggacctccagcgaggctggcacccagaaactcgacggtcctcaagagagccgcgcagatgactcaaaactgatggactctctgcctgggaattttgaaataacgacgtccacgggtttcctgacagacttgaccctggatgacatcctgtttgctgacattgatacgtccatgtatgattttgacccctgcacttcctcatcagggacagcctcaaaaatggcccctgtgtctgccgacgacctcctcaaaactctggctccttacagcagtcagcctgtcaccccaagtcagcctttcaaaatggacctcacagagctggaccacatcatggaggtgcttgttgggtcctaagacccagggacccagcgactatgcccacccagaccccagagcgttcccataaccctgacagttctccacactgtgcatgcacccttgcttgcctttttcagagaaaaagaaaattttacaacaggatcacactagtttttgctttgagcagagttggagtgccttcatccaagtatgaccacttttaatacacttttttgagtggttcctcagagacctactaccctggtataggaaagaatccatttgaagacaatgttgcaatgttgaatgacaaaaataaacagttcaagtgaagcacaaggattaagttggaaaagctgtaaattgcatgtgcatatttgtctattttttctataagttttattgcaagaggtaaagaagaaaactatatatatatatcttatttagataatctcagtaccttttctggcatttttgccctgtataggttgacttggcaattcggcctttttagaggcattaactactcctcgtaagtgttgcatttacatggctgtttagaaaactgctgcccaaatttattttatatttttgtacagattctgcagtttatgatattgtttttctaaaaacaaatgctgtttatacatatgagatagctattttgataggatttgctcacatagttcctgcaaacttcagatgtacaagttgcacttgtacttttatagagttgtaatgttttatatgtgtatggtgcaagagaaaattggatcaaatcaatctgcagttgatgtccccaaatgcaaacacaggcacacacatgcacacacccataaacacacacacagtgctttaagaaagggccaggtgatatcacacccaaatttcacaagcactgaccccctggcaccaacacccgccagtactgtgacttccaaagccagagccacatgtgctcatcaaacttgcattaagcagttggcgggagatggctgtggagctgggggtttaagtgatggttctcttttgctccctcttttgagggtaaagctactgtctttcttaagagtgtatttatgccaagtttgcgcttttaattgtttttattttgttttttaatgaaaacccagatctttcctttttggcataatttttatgatgacctgaaattttacatccgaacaaaattttacatccgaaaagcaaccaacttcttcatggaactcagccctgttgcaatgcttagggcccttaaagaagaaaatctccccagaaggcatccatcatgttgcttaattgtcttctgcagcttcctttccctagagctttccctgtgttgctaagagctgaaaatggcatcttcgtgatcaccacagtgagcttggctcgcctcggccggcccgggatgcactcttacaacatgtgtgactcttgaacctggagttcatcacattacgtcacagcttcccatctggttgctttcctgagtcagctacttcacacttgtcaaggctgttttaccccaaaactcagacaggactttctatgcatgttttccctcctccccccaattccccccccatcaccttatctcccaggacacacttgagaagtagctttttattcctagtggtgtacatttaattttaaaaaggttgcaatgtatcatgcttgttgccgaaactgtttatggccttcttgtttcagttttttcttttcttccaatggtactttagctgttgagtgcaggttacaacctatattgttatgcagatggcttctttaggaataacttttatatttatttaaaaatttttaaattatgggatgttttgttgttgttgttgtctttgttgttggtcatttgtcaatattcagtcaccaattctgctcacttcttgccatggataaaattgggtctttctggctaattaaaaaagacaactttataaaatggcactttaagcaagccatagttagttttatttttgtaatgcacatggcaaagcaaagacgtttgtgatgaaggaactgctcatctaagcaaaagatttgagtatgatatgataaaggctttctacattctaatttactttttccccccacttgaatgtgttttaaaggctaattatcagctcagtagagcagtgagaaactgatcaaattgcacttgttctcctacaagcaacctccacgcagacacctcgtactgctacaggtgtgtcatttcctttaataggaccagggaccatgtaactgaggtgagggttgtagtagatgcttccagtgtcagtatgcctgttaattttaagagcttccctttcttgcagagaacaagtctgcccagattccatgctttctataactggaggacctggcaaacctgccgcatgctgcacacatctacctacgtacacatatacaatagtattgatgattctgaacaataacagggtaaaacagttggtttgccattgttaaaaactgatttacagtaacttacaacaactgtacttttgttggattagcaaatcatgtgtttaaacaaatcccatatgttgggcaacagttcaaataagcacggagaagtgttgcccaaacttggttctctgactcttatgtatttgtaaggctgggcttcaaaatcaaaacaaaaaccccaaaaacagcaggcaaatgctttttaactctgacaccgttgccataaatccctgatactcaaagtctaacaagaaagacatggaaaattagcagcccattttcagaaagatcaaaatgatctagggttctaattgcttttgcatcctattcttacaaagtgatgtcccaacagggaacagtaggagctggagtgggatctccaagtcccagtttgagtgtgggatgtgcttccagcagtgccttccctttatgaaagacatcacatggcatccagggccaggcaggcagcttgaggtgcctttacgagaaaaccgagctggggctgggagaggacagttattgacactgatgtgcaatgaagtgacaagatgagagcagaatcgtaagagctttgaatttgaagtgagtttttttccccccataagttatttattccttttttctgtgtaaatatatttattttactgtggagcgctaacatctggatcgtaacatgtgcagaatgtatggtaggaatgtattctcttgtaggaatgtaaatctgtattaaaagggggtccaagccaggcccccaggtcttctcattgtatgcacagtccgcattcatttttactcttctctaatatgggtctatttgaaatatgcaaaaggtatgaggaatgttttaatacctccaaatttttaagaaaagcatcaaagggttgatattttttaaagtttttttagtagcactttctctggatgacagaaggggcaaccacatgggcacccttgttcataccaaagggtgagcagtggccagagcctcctctgcacctctcgagtgtctttaccaattgagctttttatcgccatagccccttggagtgccccagctgccctgaggtcaatcaaggaaaatttcttaatgaaataagctccaaagagccaaagtatcaacttacagatcgtttttaaagcttaaatttatgaaccacctttgtggtaaacaatgaattatgaataccgcagggcagccttcttaaatgacaaatgtaaaaaaaaaaaaaaaagactctacttcgtgcagcaattgctactctatacgaattgtcttaatttgaaaaccttgctgttacaaattggacctttatacattttctgaaaacaatgaaaagagtatatttaaccttttctggctgtaaatggttaccttcctgtaactgccccgcacctggaggcatggagttgtgtgcatcctgcttatgtacaattgttttcagtgtttctaagaatgagtctgaatggttcttgaaaattagccaggatcaaatgctattgcagacaaagccaataaaaagttggacttcttttggggataacaagttttggaagagaaatgcaggccatatgtgcgcatgaccgagattttgaaaaaagatgtacatagtgacatgtttggtgcatggtttttgaggagggcttttgtcaaaaaggaggtataacctttcccccacagacctgagagctgtgccttttctatgcaatattacagacgttacatcggaacccagatggctgtattcacatgtaggtttgggctgtaatctaaacaattggacagattaaatgtacatggaaatgagcagtcttacttttgtagttttatattatacaataaacagttaaaagatg

SEQ ID NO: 33 - protein, 378 aa, Homo Sapiens
MTSRDNYKAGSREAAAAAAAAVAAAAAAAAAAEPYPVSGAKRKYQEDSDPERSDYEEQQLQKEEEARKVKSGIRQMRLFSQDECAKIEARIDEVVSRAEKGLYNEHTVDRAPLRNKYFFGEGYTYGAQLQKRGPGQERLYPPGDVDEIPEWVHQLVIQKLVEHRVIPEGFVNSAVINDYQPGGCIVSHVDPIHIFERPIVSVSFFSDSALCFGCKFQFKPIRVSEPVLSLPVRRGSVTVLSGYAADEITHCIRPQDIKERRAVIILRKTRLDAPRLETKSLSSSVLPPSYASDRLSGNNRDPALKPKRSHRKADPDAAHRPRILEMDKEENRRSVLLPTHRRRGSFSSENYWRKSYESSEDCSEAAGSPARKVKMRRH

SEQ ID NO: 34 - DNA, 2371 bp, Homo Sapiens
aagtgttacttctgctctaaaagctgcggaattcctcgagcactggcggccgccagcggctacacggacctgcgtgagaagctcaagtccatgacgtcccgggacaactataaggcgggcagccgggaggccgccgccgctgccgcagccgccgtagccgccgcagccgcagccgccgctgccgccgaaccttaccctgtgtccggggccaagcgcaagtatcaggaggactcggaccccgagcgcagcgactatgaggagcagcagctgcagaaggaggaggaggcgcgcaaggtgaagagcggcatccgccagatgcgcctcttcagccaggacgagtgcgccaagatcgaggcccgcattgacgaggtggtgtcccgcgctgagaagggcctgtacaacgagcacacggtggaccgggccccactgcgcaacaagtacttcttcggcgaaggctacacttacggcgcccagctgcagaagcgcgggcccggccaggagcgcctctacccgccgggcgacgtggacgagatccccgagtgggtgcaccagctggtgatccaaaagctggtggagcaccgcgtcatccccgagggcttcgtcaacagcgccgtcatcaacgactaccagcccggcggctgcatcgtgtctcacgtggaccccatccacatcttcgagcgccccatcgtgtccgtgtccttctttagcgactctgcgctgtgcttcggctgcaagttccagttcaagcctattcgggtgtcggaaccagtgctttccctgccggtgcgcaggggaagcgtgactgtgctcagtggatatgctgctgatgaaatcactcactgcatacggcctcaggacatcaaggagcgccgagcagtcatcatcctcaggaagacaagattagatgcaccccggttggaaacaaagtccctgagcagctccgtgttaccacccagctatgcttcagatcgcctgtcaggaaacaacagggaccctgctctgaaacccaagcggtcccaccgcaaagcagaccctgatgctgcccacaggccacggatcctggagatggacaaggaagagaaccggcgctcggtgctgctgcccacacaccggcggaggggtagcttcagctctgagaactactggcgcaagtcatacgagtcctcagaggactgctctgaggcagcaggcagccctgcccgaaaggtgaagatgcggcggcactgagtctacccgccgccctcctgggaactctggctcatccttacgtagttgcccctccttttgttttgagggttttgtttttgttcattggggggtttttgttttttgttttttgttttttttgattctatatatttttccttggttttgttgcctgttagggctgaagaatagaattggccaggacctaggttctcatattcttggtattcctcctggatggaaaggctgttggcatcaataggggacagaggctgatgctggagtggccagtagaggtggtggagcagagcagccatcttttaagtggggctgtatcaggctgggtttatttaaaagcaacaaaatgttttggttaagaaaattattttgctttcagtgtaaatcttcgcagtgttctaaacaaagttcagtcttctgctcgcccctttccctcactgatgtctgcacttggttgaggtctcctggagcctcacaggctctgctgttctccacttctcacctgccatccacgccctgcaagctcatgcaaacaccctttcttcctcctgcggcagagttgttcaggttgcctgggcaggggcttaaacagtgccagcccctgccatcccaaagctattgttaagccccccaggcgtcctccacccacgcccactagcctgccatgtccacagttccttgggctgctgaggggctagtgcagtggtcctgacctctcttatcaagagcacacttctttgctggttgctccttttgagcatatgcgtgtgattatttggaacagttagacttgccacgttgggtcagttttagaaattgtttctagctagagggactggtgtccttccaagtctagcatttggggtatggaaaattgttgtggtgtgtggtagggtttttgttttcttttttgagttttttttccccctttagtctcctggctttttcctttcccttcccttctccactggccagcttgggcctcatcctcatgtcatccttctaggaaggcgcctgccccatcttgtctgccggcagcatgcatccaaggccagagctcaggcctgcagactgggctggtgcctcctccgcttcagggtatgggagttggtgaaggggctttcaaaaaaaaaaaaaaaaaaaaaaa

SEQ ID NO: 35 - protein, 444 aa, Homo Sapiens
MAATVNLELDPIFLKALGFLHSKSKDSAEKLKALLDESLARGIDSSYRPSQKDVEPPKISSTKNISIKQEPKISSSLPSGNNNGKVLTTEKVKKEAEKRPADKMKSDITEGVDIPKKPRLEKPETQSSPITVQSSKDLPMADLSSFEETSADDFAMEMGLACVVCRQMMVASGNQLVECQECHNLYHRDCHKPQVTDKEANDPRLVWYCARCTRQMKRMAQKTQKPPQKPAPAVVSVTPAVKDPLVKKPETKLKQETTFLAFKRTEVKTSTVISGNSSSASVSSSVTSGLTGWAAFAAKTSSAGPSTAKLSSTTQNNTGKPATSSANQKPVGLTGLATSSKGGIGSKIGSNNSTTPTVPLKPPPPLTLGKTGLSRSVSCDNVSKVGLPSPSSLVPGSSSQLSGNGNSGTSGPSGSTTSKTTSESSSSPSASLKGPTSQDHSSML

SEQ ID NO: 36 - DNA, 1598 bp, Homo Sapiens
gtgagttgaccagagaaggatgagagaattgccaagttgtactgaacgccaagctgagaatggtgattctgaagatagaatgcgtttgcaatggctgctactgtgaacttggaacttgatcccatttttttgaaagcactaggtttcttgcattcaaagagtaaagattctgctgaaaagctaaaagcactgcttgatgaatctttggctcggggcattgattccagttaccgtccatctcaaaaggatgtggagccacccaaaatttcaagcacaaaaaacatttccattaagcaagagcccaaaatatcatccagtcttccttctggtaataataatggcaaggtcctcacaactgaaaaggtaaagaaggaagctgaaaagagacctgctgataaaatgaaatcagacatcactgaaggagttgatattccaaagaaacctagattggagaaaccagaaacacagtcatctcccattactgtccaaagtagcaaggatttacctatggctgacctttccagttttgaggagaccagtgctgatgattttgccatggagatgggattggcctgcgttgtttgtaggcaaatgatggtggcatctggcaatcaattagtagaatgtcaggagtgccataatctctaccaccgagattgtcataaaccccaggtgacagacaaggaagcgaatgaccctcgcctggtgtggtattgtgcccgatgtaccagacaaatgaaaagaatggctcaaaaaactcagaaaccaccgcagaaaccagcccctgcagttgtttctgtaactccagctgtcaaagatccattggttaagaaaccagaaactaaactgaaacaagagacaacttttctagcgtttaagagaacagaagtcaagacatccacagttatttcaggaaattcttctagtgccagcgtttcctcgtcagtaactagtggcttaactggatgggcagcttttgcagccaaaacttcctctgctggtccttcaacagcaaaattgagttcaacaacacaaaacaatactgggaaacctgctacttcgtcagctaaccagaaacctgtgggtttgactggtctggcaacatcatccaaaggtggaataggttccaaaataggttccaataacagcactacgcccactgtacctttaaaaccacctccacctctaaccttgggtaaaactggccttagtcgctcagttagttgtgacaatgtcagcaaagtaggtcttcctagtccaagtagtttagttccaggaagcagcagccaactaagtgggaatggaaatagtggaacatcaggacctagtggaagtactaccagcaaaactacttcagaatccagcagctctccctcagcatcccttaaaggcccaacttcacaagatcacagctcaatgctatgaagcgattacagatggtcaagaagaaagctgcccaaaagaaactcaagaagtaatgtggccaagtaggtttttgtatcatattagcctaaagatgaaaggcttattattatgatataatctgtaatacactgtaatttaataaaagtcttcataatcaaaaaaaaaaaaaaaaa

SEQ ID NO: 37 - protein, 1795 aa, Homo Sapiens
VDSAMELLFLDTFKHPSAEQSSHIDVVRFPCVVYINEVRVIPPGVRAHSSLPDNRAYGETSPHTFQLDLFFNNVSKPSAPVFDRLGSLEYDENTSIIFRPNSKVNTDGLVLRGWYNCLTLAIYGSVDRVISHDRDSPPPPPPPPPPPQPQPSLKRNPKHADGEKEDQFNGSPPRPQPRGPRTPPGPPPPDDDEDDPVPLPVSGDKEEDAPHREDYFEPISPDRNSVPQEGQYSDEGEVEEEQQEEGEEDEDDVDVEEEEDEDEDDRRTVDSIPEEEEEDEEEEGEEDEEGEGDDGYEQISSDEDGIADLERETFKYPNFDVEYTAEDLASVPPMTYDPYDRELVPLLYFSCPYKTTFEIEISRMKDQGPDKENSGAIEASVKLTELLDLYREDRGAKWVTALEEIPSLIIKGLSYLQLKNTKQDSLGQLVDWTMQALNLQVALRQPIALNVRQLKAGTKLVSSLAECGAQGVTGLLQAGVISGLFELLFADHVSSSLKLNAFKALDSVISMTEGMEAFLRGRQNEKSGYQKLLELILLDQTVRVVTAGSAILQKCHFYEVLSEIKRLGDHLAEKTSSLPNHSEPDHDTDAGLERTNPEYENEVEASMDMDLLESSNISEGEIERLINLLEEVFHLMETAPHTMIQQPVKSFPTMARITGPPERDDPYPVLFRYLHSHHFLELVTLLLSIPVTSAHPGVLQATKDVLKFLAQSQKGLLFFMSEYEATNLLIRALCHFYDQDEEEGLQSDGVIDDAFALWLQDSTQTLQCITELFSHFQRCTASEETDHSDLLGTLHNLYLITFNPVGRSAVGHVFSLEKNLQSLITLMEYYSKEALGDSKSKKSVAYNYACILILVVVQSSSDVQMLEQHAASLLKLCKADENNAKLQELGKWLEPLKNLRFEINCIPNLIEYVKQNIDNLMTPEGVGLTTALRVLCNVACPPPPVEGQQKDLKWNLAVIQLFSAEGMDTFIRVLQKLNSILTQPWRLHVNMGTTLHRVTTISMARCTLTLLKTMLTELLRGGSFEFKDMRVPSALVTLHMLLCSIPLSGRLDSDEQKIQNDIIDILLTFTQGVNEKLTISEETLANNTWSLMLKEVLSSILKVPEGFFSGLILLSELLPLPLPMQTTQVIEPHDISVALNTRKLWSMHLHVQAKLLQEIVRSFSGTTCQPIQHMLRRICVQLCDLASPTALLIMRTVLDLIVEDLQSTSEDKEKQYTSQTTRLLALLDALASHKACKLAILHLINGTIKGDERYAEIFQDLLALVRSPGDSVIRQQCVEYVTSILQSLCDQDIALILPSSSEGSISELEQLSNSLPNKELMTSICDCLLATLANSESSYNCLLTCVRTMMFLAEHDYGLFHLKSSLRKNSSALHSLLKRVVSTFSKDTGELASSFLEFMRQILNSDTIGCCGDDNGLMEVEGAHTSRTMSINAAELKQLLQSKEESPENLFLELEKLVLEHSKDDDNLDSLLDSVVGLKQMLESSGDPLPLSDQDVEPVLSAPESLQNLFNNRTAYVLADVMDDQLKSMWFTPFQAEEIDTDLDLVKVDLIELSEKCCSDFDLHSELERSFLSEPSSPGRTKTTKGFKLGKHKHETFITSSGKSEYIEPAKRAHVVPPPRGRGRGGFGQGIRPHDIFRQRKQNTSRPPSMHVDDFVAAESKEVVPQDGIPPPKRPLKVSQKEQEAPVGVLRILLEEITMKVVEARAILTEALFHHYDPLVLQVTAQVLGTVLLEVVGDLDLPGLVQIAAVEAQEESLLVEAVVEVVMYAPLHDKNPFGNILTVYEHFTRTIKIRH

SEQ ID NO: 38 - DNA, 5507 bp, Homo Sapiens
ggtggactcggcgatggagctgttatttttagatacttttaaacacccgagcgctgagcaaagttctcatatagatgtggttcgttttccatgtgtggtttatatcaatgaagtccgagtcatacccccaggagtaagagcccatagcagtctgccagacaatagagcatatggagagacatctccccatacatttcaattagacttattcttcaacaatgtaagcaaaccaagtgcccctgttttcgataggttgggaagcctggaatatgatgagaatacttccatcatctttagacctaactcaaaggtgaatactgatggtctggtgctaagaggctggtataactgtctgacactggcaatatatggatcagtggatagagtgataagtcatgacagagactctccaccaccaccacctccaccgccaccacctccccagccacaaccaagtttgaaaaggaatccaaaacatgctgatggggagaaagaagatcagtttaatggaagccctccaagaccacagccaaggggaccaagaactcctccaggaccccctccacctgatgatgatgaagatgatcctgtgcctctgccagtgtctggtgacaaggaagaggatgctcctcatagagaagattactttgagcccatttctcctgatcggaattctgttccccaggaagggcaatattctgatgaaggagaagtagaagaggaacaacaagaagaaggagaagaagatgaagatgatgtggatgtagaggaagaagaggatgaggatgaggatgatcgacgaacagtagacagtattcctgaggaggaagaggaagatgaagaggaagaaggtgaagaggatgaagaaggtgaaggggatgatggttatgaacaaatttccagtgatgaagatggaattgctgacttggaacgtgaaacatttaagtatccaaactttgatgttgaatacactgctgaagacttagcttcagttcctcctatgacatatgatccatatgacagggagcttgtaccactcttatacttcagttgtccatacaagactacttttgaaattgaaatcagtagaatgaaggatcaaggtccagataaagaaaattcaggggcaatcgaagcctcagtgaagttaacagaactcttagatttgtatagagaagatagaggtgcaaaatgggtaacagctttagaagaaattccaagtttaataataaaagggttaagctatttgcaattgaaaaacacaaaacaagactcccttggccagttggtagactggaccatgcaagctttaaatttacaagtagcgcttcgccaacctatcgccttaaatgttcgacagctcaaagctgggaccaaattagtgtcctcactagcagaatgtggggctcaaggagttacaggactgctacaagcaggagtgatcagtggattatttgaacttctgtttgctgatcacgtatcatcttctcttaagttaaatgcttttaaagctttggacagtgtcattagtatgacagaaggaatggaagcttttttaagaggtaggcagaatgaaaaaagtggttatcaaaagcttctggaactcatacttttagatcagactgtgagggttgttactgctggttcagctattctccaaaaatgccatttctatgaagtcttgtcagagattaaaagacttggtgaccatttagcagagaagacttcatctcttcctaaccacagtgaacctgatcacgacacagatgctggacttgagagaacaaacccagaatatgaaaatgaggtggaagcttctatggatatggatcttttggaatcctcaaatataagtgaaggggaaatagaaaggcttattaacctcctagaagaagtttttcatttaatggaaactgcccctcatacaatgatccaacaacctgttaagtctttcccaacgatggcacgaattactggacctccagagagggatgatccataccctgttctctttagatatcttcacagtcatcacttcttggagttggttaccttgcttctgtcaattccagtaacaagtgctcaccctggtgtgctgcaagccacaaaagatgttttgaagtttcttgcacagtcacagaagggtcttcttttttttatgtcggaatatgaagcaacaaatttattgatccgagctctgtgtcacttttatgatcaagatgaggaggaaggtctccaatctgatggtgttattgatgatgcatttgccttgtggctacaggactcaacacagacattgcaatgtattacagaactgttcagccattttcagcgttgtacagccagtgaagaaacagaccattcagatctcttgggaaccctgcacaatctttatttgattacttttaatcctgtgggaagatcagctgttggccatgtttttagtctggagaaaaatctccaaagtcttattactctaatggagtactattccaaagaagccttgggtgattccaaatctaagaagtcagtagcttataattacgcatgcatacttattttggtggtggttcagtcttccagtgatgttcaaatgctagaacaacatgcagcatctctcttgaagctttgtaaagcagatgaaaataatgctaaattgcaagaacttggcaagtggcttgaacctctgaaaaaccttagatttgaaattaactgcatcccaaacttaattgagtatgttaagcagaatatcgataacttgatgaccccagaaggagttggccttaccactgccttacgtgttctctgtaatgttgcatgcccaccacctcctgttgaaggtcaacagaaagatctgaaatggaatcttgccgttattcagcttttttctgctgaaggaatggacacgtttattcgagttctgcaaaaattgaacagtattctgactcagccttggaggctccatgtcaacatggggactacccttcacagagttactactatttcaatggctcgctgcacactcactcttcttaaaactatgttaacggaactcctgagaggtggatcctttgagtttaaggacatgcgtgttccttcagcgcttgttactttacatatgctcctgtgctctatccccctctcaggtcgtttggatagtgatgaacagaaaattcagaatgatatcattgatattttactgacttttacacaaggagttaatgaaaaactcacaatctcagaagagactctggccaataatacttggtctttaatgttaaaagaagttctttcttcaatcttgaaggttcctgaaggatttttttctggactcatactcctttcagagctgctgcctcttccattgcccatgcaaacaactcaggttattgagccacatgatatatcagtggcactcaacacccgaaaattgtggagcatgcaccttcatgttcaagcaaagttgctccaagaaatagttcgctctttctctggcacaacctgccagcccattcaacatatgttacggcgtatttgtgttcaattgtgtgaccttgcctcaccaactgcacttctgattatgagaactgtgttggatttgattgtagaagacttgcaaagcacttcagaagataaagaaaaacagtatactagccaaaccaccaggttgcttgctcttcttgatgctctggcttcacacaaagcttgtaaattagctattttgcatctaattaatggaactattaaaggtgatgaaagatatgcagagatattccaggatcttttagctttggtgcggtctcctggagacagtgttattcgccaacagtgtgttgaatatgtcacatccattttgcagtctctctgtgatcaggacattgcacttatcttaccaagctcttctgaaggttctatttctgaactggagcagctctccaattctctaccaaataaagaattgatgacctcaatctgtgactgtctgttggctacgctagctaactctgagagcagttacaactgtttactgacatgtgtcagaacaatgatgtttcttgcagagcatgattatggattatttcatttaaaaagttctttaaggaaaaacagtagtgctctgcatagtttactgaaacgagtggtcagcacatttagtaaggacacaggagagcttgcatcttcatttttagaatttatgagacaaattcttaactctgacacaattggatgctgtggagatgataatggtctcatggaagtagagggagctcatacatcacggacgatgagtattaatgctgcagagttaaaacagcttctacaaagcaaagaagaaagtccagaaaatttgttccttgaactagagaagcttgttttggaacattcaaaagatgatgacaatctggattctttgttggacagtgtagttggacttaagcagatgctggagtcatcaggtgaccctttacctctcagtgaccaggatgtagaaccagtactttcagctccagaatctcttcagaatctgtttaacaataggactgcctatgtgcttgctgatgtcatggatgatcagttgaaatctatgtggttcactccatttcaggctgaagagatagatacagatctggatttggtaaaggttgacttaattgaactctctgaaaaatgctgtagtgactttgatttgcactcagaattagagcgctcatttttgtcagaaccatcatctccaggaagaaccaagactactaaaggattcaaacttgggaagcacaagcatgagacctttataacgtcaagtggaaaatctgaatacattgaacctgccaaaagagctcatgttgtgccaccaccaagaggaaggggcaggggaggatttggacagggtatacgacctcatgatatttttcgtcagagaaaacagaacacaagtagaccaccatctatgcatgtggatgactttgttgctgctgaaagtaaagaagtggttcctcaagatggaatacctccaccaaaacggccactcaaagtatcacagaaggaacaagaggctccagttggagtgctcagaatactcctcgaggaaattacaatgaaagtcgtggaggccagagcaattttaacagaggccctcttccaccattacgaccccttagttctacaggttaccgcccaagtcctcgggaccgtgcttctagaggtcgtgggggacttggaccttcctgggctagtgcaaatagcggcagtggaggctcaagaggaaagtttgttagtggaggcagtggtagaggtcgtcatgtacgctcctttacacgataaaaatccttttgggaacatcttaactgtatatgaacatttcacgaggacaataaaaataagacattgaaggaccaatttagacttagcagttatctggagacatctgagagaatatttttatctgaagaaagcagaatttgtttgatacctaacaagatttcaataaaaatccaaactttgtatgt

SEQ ID NO: 39 - protein, 931 aa, Homo Sapiens
MAARDSDSEEDLVSYGTGLEPLEEGERPKKPIPLQDQTVRDEKGRYKRFHGAFSGGFSAGYFNTVGSKEGWTPSTFVSSRQNRADKSVLGPEDFMDEEDLSEFGIAPKAIVTTDDFASKTKDRIREKARQLAAATAPIPGATLLDDLITPAKLSVGFELLRKMGWKEGQGVGPRVKRRPRRQKPDPGVKIYGCALPPGSSEGSEGEDDDYLPDNVTFAPKDVTPVDFTPKDNVHGLAYKGLDPHQALFGTSGEHFNLFSGGSERAGDLGEIGLNKGRKLGISGQAFGVGALEEEDDDIYATETLSKYDTVLKDEEPGDGLYGWTAPRQYKNQKESEKDLRYVGKILDGFSLASKPLSSKKIYPPPELPRDYRPVHYFRPMVAATSENSHLLQVLSESAGKATPDPGTHSKHQLNASKRAELLGETPIQGSATSVLEFLSQKDKERIKEMKQATDLKAAQLKARSLAQNAQSSRAQLSPAAAAGHCSWNMALGGGTATLKASNFKPFAKDPEKQKRYDEFLVHMKQGQKDALERCLDPSMTEWERGRERDEFARAALLYASSHSTLSSRFTHAKEEDDSDQVEVPRDQENDVGDKQSAVKMKMFGKLTRDTFEWHPDKLLCKRFNVPDPYPDSTLVGLPRVKRDKYSVFNFLTLPETASLPTTQASSEKVSQHRGPDKSRKPSRWDTSKHEKKEDSISEFLSLARSKAEPPKQQSSPLVNKEEEHAPELSANQTVNKDVDAQAEGEGSRPSMDLFRAIFASSSDEKSSSSEDEQGDSEDDQAGSGEANFQSSQDTDLGETSSVAHALVPAPQEPPPSFPIQKMQIDEREEFGPRLPPVFCPNARQTLEVPQKEKHKKNKDKHKAKKEHRRKKEKKKKHRKHKHKGKQKNKKPEKSSSSESSDSSDSQSDEETADVSPQELLRRLKSLPLRRQ

SEQ ID NO: 40 - DNA, 1743 bp, Homo Sapiens
gtgttagaatttctgtcccaaaaagacaaagagagaatcaaagaaatgaagcaggcaactgacctgaaagcagctcagctcaaggccaggagtctggcccagaacgctcagagcagcagagcccagctctcccctgcagcggctgctgggtactgctcttggaacatggcattaggtggtgggacggccaccttaaaagccagcaacttcaagcctttcgccaaagatccggaaaagcaaaagcgatacgacgagttcttagtacacatgaaacagggtcagaaagatgctctggaacgctgtctggaccccagcatgacggagtgggagcgaggccgtgagcgggatgagtttgcccgggcggccctgctgtacgcatcttcccattcgaccttgtcctccaggttcactcacgccaaggaggaggatgactcagatcaggttgaagtccctcgagaccaagagaatgatgtcggggataagcagtcggctgtgaagatgaagatgtttgggaagctcacccgagacacgtttgagtggcaccctgacaagcttctatgtaagagatttaatgtccctgacccttatccagattcaactttagttggcttaccaagagtgaagcgtgacaagtactcagtcttcaactttctgacgctcccagagacagcttccttgcccaccactcaagcatcaagtgaaaaagtatcacagcaccgaggtcccgacaaatcaagaaaaccatccagatgggatacctctaaacacgaaaagaaagaagattccattagtgaatttttaagtttggctagatcaaaagccgagccacctaaacaacagtccagccccttagtaaacaaagaggaagagcatgcaccagaatcatccgcaaatcagacagtcaacaaagatgtggacgcacaggctgaaggagaagggagccgcccatccatggacttattcagggccatctttgccagttcctcagatgaaaagtcctcatcctccgaggatgagcaaggtgacagtgaagatgatcaggcaggctctggggaggccaacttccaaagctcccaagacactgacttgggggaaacatcatctgtggctcacgctcttgtgccagcaccccaggagccgccaccttccttcccgatacaaaagatgcagatagatgaaagagaagagttcggcccgcggctgcctcccgtcttctgccccaatgctcgtcagacacttgaggttcctcaaaaagagaaacataaaaagaacaaagacaagcacaaggccaagaaagagcacaggcggaagaaagagaagaaaaagaaacacaggaagcacaaacacaaaggcaagcaaaagaataaaaaaccagagaaaagtagtagctccgagagttccgacagcagcgacagccagagtgacgaggaaaccgcagacgtgtcgccccaggagctgctgagacggctgaaaagtcttccactaagaaggcagtaattgaatgctgccctggctcgtcctagaatcatttctcctccatgatggaagcccagtgattgttcagttaacgcattgtacagagtgtatttatatgtaaattcctgctgtaaaataatttttaaaaccttgacatttcaaagactgccttgaaaggtcgcagaaattgatttctatttttaatttcagttagtatcgggggaaaaaaatccagattgaacagtttaattaaagtggaatttttct

SEQ ID NO: 41 - protein, 462 aa, Homo Sapiens
MAQVSINNDYSEWDLSTDAGERARLLQSPCVDTAPKSEWEASPGGLDRGTTSTLGAIFIVVNACLGAGLLNFPAAFSTAGGVAAGIALQMGMLVFIISGLVILAYCSQASNERTYQEVVWAVCGKLTGVLCEVAIAVYTFGTCIAFLIIIGDQQDKIIAVMAKEPEGASGPWYTDRKFTISLTAFLFILPLSIPREIGFQKYASFLSVVGTWYVTAIVIIKYIWPDKEMTPGNILTRPASWMAVFNAMPTICFGFQCHVSSVPVFNSMQQPEVKTWGGVVTAAMVIALAVYMGTGICGFLTFGAAVDPDVLLSYPSEDMAVAVARAFIILSVLTSYPILHFCGRAVVEGLWLRYQGVPVEEDVGRERRRRVLQTLVWFLLTLLLALFIPDIGKVISVIGGLAACFIFVFPGLCLIQAKLSEMEEVKPASWWVLVSYGVLLVTLGAFIFGQTTANAIFVDLLA

SEQ ID NO: 42 - DNA, 2773 bp, Homo Sapiens
atgtgatgcatgctcacgtgtctccgcagccggctcgggaaagaatcccccaagctccatttcatgagtaagcgtgagagccgctcagtttcctccagctctgctgaagccagcacagaagtagcccaaactcttccctctgctgacagcaaattttaggcaaagtcttgagaaagaagaaattgggtccagaaagggaagtgaggagaatcagatcccagacctttggggagaaggagcaaccgcctctggcacagcccatcagggagaaagagcaggttgagaagagtcctaagctaacagccccaaacaggtgggtgttgctcagctccctgaggcatgtggttgtaaggcagaacccacagaccttgcaggaagaaggctctcggggccatggcccaggtcagcatcaacaatgactacagcgagtgggacttgagcacggatgccggggagcgggctcggctgctgcagagtccctgtgtggacacagcccccaagagtgagtgggaagcctctcctgggggtctggacagaggcaccacttccacacttggggccatcttcatcgtcgtcaacgcgtgcctgggtgcagggttactcaacttcccagcagccttcagcactgcggggggcgtggcagcaggcatcgcactgcagatgggtatgctggttttcatcatcagtggccttgtcatcctggcctactgctcccaggccagcaatgagaggacctaccaggaggtggtatgggctgtgtgtggcaagctgacaggtgtgctatgtgaggtggccatcgctgtctacacctttggcacctgcattgccttcctaatcatcattggcgaccagcaggacaagattatagctgtgatggcgaaagagccggagggggccagcggcccttggtacacagaccgcaagttcaccatcagcctcactgccttcctcttcatcctgcccctctccatccccagggagattggtttccagaaatatgccagcttcctgagcgtcgtgggtacctggtacgtcacagccatcgttatcatcaagtacatctggccagataaagagatgaccccagggaacatcctgaccaggccggcttcctggatggctgtgttcaatgccatgcccaccatctgcttcggatttcagtgccacgtcagcagtgtgcccgtcttcaacagcatgcagcagcctgaagtgaagacctggggtggagtggtgacagctgccatggtcatagccctcgctgtctacatggggacaggcatctgtggcttcctgacctttggagctgctgtggatcctgacgtgctcctgtcctatccctcggaggacatggccgtggccgttgcccgagccttcatcatcctgagcgtgctcacctcctaccctatcctgcacttctgtgggcgggcggtggtggaaggcctgtggctgcgctaccagggggtgccagtggaggaggacgtggggcgggagcggcggcggcgagtgctgcagacgctggtctggttcctgctcaccctgctgctggcgctcttcatccctgacatcggcaaggtgatctcagtcattggaggcctggccgcctgcttcatcttcgtcttcccagggctgtgcctcattcaagccaaactctctgagatggaagaggtcaaaccagccagctggtgggtgctggtcagctacggagtcctcttggtcaccctgggagccttcatcttcggccagaccacagccaacgccatctttgtggatctcttggcataaccactgcctcccagggaacacaaggcctttgccattggtcgcaggaacccatctcttagagctatggggccattcttagtccacgatcattccaactggtgggatgacatccggacatcctcttccagggactggggcaaactcaggccccacacctctggacagctcaaatccagtccccttcctgctccccagtcctggcagtgccgtggatggcggcaggaagtctcacatcatagaggacccctcctcctctcccagttctcaacttctccatgcctggaatccacgggtgaagagagtcggtagatctcataagaaagaatccagtctgacttccctctggagaatgactatggacagaaggccaccatcctccacagagcaccctgtcctgagtaggggttgtgctcattaccccaggccagtggtagcttcctcaggagcctggccacttccaaaggtagcactgaagtcgtgcaaatacatagtcaggtagattcagaccttgtccacaccttcctgggcaacccccaccatgaacctgtcagcctctttcccatagctaatagacatttcccaggccttgaggggccccaccctgtctctttcatcaaacctgatggtccaggctgggcatccctctcctcctccatccccagacatcaccaggtctaatgtttacaaacggtgccagcccggctctgaagccaagggccgtcccgtgccacggtgctgtgagtattcctccgttagctttccccataaggttgggagtatctgcttttgtgtctgagatgggcccctcttttcagaggccgcagggtgggtgatggagaaggctgagaacctttcagaccctctgtgtgggctgggctggtcagaatcagggtgtacctccccgacaccttctttttcagtgatgttttctcttctccctgcctttcctctgcctcctcccctgccagccctagcgtgactacccagagac

SEQ ID NO: 43 - protein, 462 aa, Homo Sapiens; identical to SEQ ID NO: 41

SEQ ID NO: 44 - DNA, 2196 bp, Homo Sapiens
gaggccaagagcgcgggcggcgaggcaagatggcggcaaccaagaggaaacggcgtggaggctttgcagttcaggcgaagaagccaaaaagaaacgaaatagatgcggagccgccagctaagcggcacgccacagcagaggaggtggaggaagaagagagggaccggatcccaggccccgtttgcaagggaaagtggaaaaataaggaacggattctcatcttttcttccagaggaataaattttagaacaagacatttaatgcaggacttgagaatgttgatgcctcattctaaagcagatactaaaatggatcgtaaggataagctatttgtgattaacgaggtttgtgaaatgaagaactgtaataaatgcatctattttgaagctaagaaaaaacaggatctctatatgtggtaagagaatgtattaagattttggttaaactcatttaagtggatttgttctttgtaccttttatgttatagactcctagtgtttcatgttaagggttgagaatgaagcaaacttttgatttcacgaaacttgatacctttaaagaaaattaaatgtataaatattataagcatattatttatggtgaataggtggtaagcattgactacatttgctaattagtggaaaaagcttactccatatctttcaggctttcaaattcacctcacggaccatctgctaaattccttgttcaaaatagtaagttgactcaataaatttttttagatgaggaaattaaaagtaatcttttgaaatagttgtgcaaaagttacaactatttttgtttttgttgtaatttttctagttcataccctcgctgaactgaagatgactggaaactgtttgaaaggttctcggccccttttgtcttttgaccctgtaagtttctcattcagtgtatgaggtctaattttcttatctggcatggttgtttttagtagatatagttgtgttattcaatttagtttcacccccaccttggttttatggattatcaattctttcaggtacatttataatgaggttatagccaagttatagaaacaaatgagcaaacagttttaaacaaggcagtctactgttaaataatatgcttaccttatttttataggcttttgatgaattaccacattatgctttgttaaaagaactcttaattcaggtaaatatctttaaaattagctatccaaaatatacatgatatatcttggaataaggaactaacatacacttttttaactagatctttagtacaccacggtatcatcccaaaagccaaccatttgtggaccacgtgtttactttcaccattttggataataggatatggtttcggaactttcagatcatagaagaagatgctgctcttgtagaaataggacctcgttttgtcttaaatctcataaagattttccagggaagttttggaggaccaactttatatgaaaatcctcactaccagtcaccaaacatggtaagcggttgtgtcattcagtagtcttcaatgtaccagaaccctttggccaaaatgattctgtgaagtaattgctgttttattacctgtgaaactgaatttggtttttgctgcatagaaacttggaaattactcccttttttcatgacactggctgaaaggatatatggttcataactgaaagtctttgccttatataaaatgtttatttttatttcaaaagcatctaatcttttttttttttttttagcatcggcgtgtcataagatccatcacagctgcaaaatacagagagaaacagcaagtgaaagatgtgcaaaaactgagaaagaaagagccgaagactcttcttccacatgatcccactgcagatgtttttgtaacaccagctgaggagaaaccaatagaaatacagtgggtaaaaccagagccaaaagttgatttgaaagcaagaaagaaacggatttacaaaaggcaaagaaaaatgaaacagaggatggacagtgggaaaacaaaataagtcaatggaaacctgatttgtttttcagttactttatatttattttgtattcaatgtgtaaatacttttattatctaatactatcttacgtctaattagtgtagcatttacaagaaagaaaaattaagatcttaaaatcagtgattatctttttctaaataaaatatcaccagaattcatcagtt

SEQ ID NO: 45 - protein, 453 aa, Homo Sapiens
MDWKEVLRRRLATPNTCPNKKKSEQELKDEEMDLFTKYYSEWKGGRKNTNEFYKTIPRFYYRLPAEDEVLLQKLREESRAVFLQRKSRELLDNEELQNLWFLLDKRQTPPMIGEEAMINYENFLKVGEKAGAKCKQFFTAKVFAKLLHTDSYGRISIMQFFNYVMRKVWLHQTRIGLSLYDVAGQGYLRESDLENYILELIPTLPQLDGLEKSFYSFYVCTAVRKFFFFLDPLRTGKIKIQDILACSFLDDLLELRDEELSKESQETNWFSAPSALRVYGQYLNLDKDHNGMLSKEELSRHGTATMTNVFLDRVFQECLTYDGEMDYKTYLDFVLALENRKEPAALQYIFKLLDIENKGYLNVFSLNYFFRAIQELMKIHGQDPVSFQDVKDEIFDMVKPKDPLKISLQDLINSNQGDTVTTILIDLNGFWTYENREALVANDSENSADLDDT

SEQ ID NO: 46 - DNA, 1781 bp, Homo Sapiens
aaaaatccggcttggtgagcttgggtcgcctctgaaggagaaccattttccatctctttcatagttttttcccccagtcagcgtggtagcggtattctccgcggcagtgacagtaattgtttttgtctctttagccaagacttccgccctcgatcaagatggtggttggacggccttcctaacctttacggggcctggcggtgctgacgcctgagctggtaggggtggagcaggtaggaaacagcaaatgcagaagctgctgcgcgggagtcggccatggactggaaagaagttcttcgtcggcgcctagcgacgcccaacacctgtccaaacaaaaaaaaaagtgaacaagaattaaaagatgaagaaatggatttatttacaaaatattactccgaatggaaaggaggtagaaaaaacacaaatgaattctataagaccattccccggttttattataggctgcctgctgaagatgaagtcttactacagaaattaagagaggaatcaagagctgtctttctacaaagaaaaagcagagaactgttagataatgaagaattacagaacttatggtttttgctggacaaacgccagacaccacctatgattggagaggaagcgatgatcaattacgaaaactttttgaaggttggtgaaaaggctggagcaaagtgcaagcaatttttcacagcaaaagtctttgctaaactccttcatacagattcatatggaagaatttccatcatgcagttctttaattatgtcatgagaaaagtttggcttcatcaaacaagaataggactcagtttatatgatgtcgctgggcaggggtaccttcgggaatctgatttagaaaactacatattggaacttatccctacgttgccacaattagatggtctggaaaaatctttctactccttttatgtttgtacagcagttaggaagttcttcttctttttagatcctttaagaacaggaaagataaaaattcaagatattttagcatgcagcttcctagatgatttattggagctaagggatgaggaactgtccaaggagagtcaagaaacaaattggttttctgctccttctgccctaagagtttatggccagtacttgaatcttgataaagatcacaatggcatgctcagtaaagaagaactctcacgccatggaacagctaccatgaccaatgtcttcttagaccgtgttttccaggagtgtctcacttatgatggagaaatggactataagacctacttggactttgtccttgcattagaaaacagaaaggaacctgcagctctacaatatattttcaaactgcttgatattgagaacaaaggatacctgaatgtcttttcacttaattatttctttagggccatacaggaactaatgaaaatccatggacaagatcctgtttcatttcaagatgtcaaggatgaaatctttgacatggtaaaaccaaaggatcctttgaaaatctctcttcaggatttaatcaacagtaatcaaggagacacagtaaccaccattctaatcgatttgaatggcttctggacttacgagaacagagaggctcttgttgcaaatgacagtgaaaactctgcagaccttgatgatacatgatctctgaaagactagactgtcttatattatgagatacttgaatgctgcatgtaaagcctttaaagcaaaatcctcagaaatggtctaaataaaacacttgatatgcctagagaacacaaaaaaaaaaaaaaaaaaaaaaaaaa

SEQ ID NO: 47 - protein, 178 aa, Homo Sapiens
MPKAKGKTRRQKFGYSVNRKRLNRNARRKAARGIECSHIRHAWDHAKSVRQNLAEMGLAVDPNRAVPLRKRKVKAMEVDIEERPKELVRKPYVLNDLEAEASLPEKKGNTLSRDLIDYVRYMVENHGEDYKAMARDEKNYYQDTPKQIRSKINVYKRFYPAEWQDFLDSLQKRKMEVE

SEQ ID NO: 48 - DNA, 910 bp, Homo Sapiens
gttacacgaggtctgagagacagaggcagcgtgtttgagctgctggtgcggtggtcagcgcgatgcccaaggccaagggcaaaacccggaggcagaagtttggttacagtgtcaaccgaaagcgtctgaaccggaatgctcgacggaaggcagcgcgcgggatcgaatgctcccacatccgacatgcctgggaccacgctaaatcggtacggcagaacctggccgagatggggttggctgtggaccccaacagggcggtgcccctccgtaagagaaaggtgaaggccatggaggtggacatagaggagaggcctaaagagcttgtacggaagccctatgtgctgaatgacctggaggcagaagccagccttccagaaaagaaaggaaatactctgtctcgggacctcattgactatgtacgctacatggtagagaaccacggggaggactataaggccatggcccgtgatgagaagaattactatcaagataccccaaaacagattcggagtaagatcaacgtctataaacgcttttacccagcagagtggcaagacttcctcgattctttgcagaagaggaagatggaggtggagtgactggtttacatcacagctgccccaggctgaggcgtcccccggaccagtgaagctggagccagggtgtaaggcaaggaggtgctgtgtggctccagaggagctggccaggtcccatggaatcagaaggttacacacacacgtgcacactccccgctctggggaaggaactgttctcagaggctccaatttatattcatctgggggttcacggaaaagccagaacctgctgttttcagggtgggtgatgtaaatatagtgtgtacataataaagcaaatatattttaaaaaaaaaaaaaaaaaaaaaaaaaaa

SEQ ID NO: 49 - protein, 286 aa, Homo Sapiens
MMPEFQKSSVRIKNPTRVEEIICGLIKGGAAKLQIITDFDMTLSRFSYKGKRCPTCHNIIDNCKLVTDECRKKLLQLKEKYYAIEVDPVLTVEEKYPYMVEWYTKSHGLLVQQALPKAKLKEIVAESDVMLKEGYENFFDKLQQHSIPVFIFSAGIGDVLEEVIRQAGVYHPNVKVVSNFMDFDETGVLKGFKGELIHVFNKHDGALRNTEYFNQLKDNSNIILLGDSQGDLRMADGVANVEHILKIGYLNDRVDELLEKYMDSYDIVLVQDESLEVANSILQKIL

SEQ ID NO: 50 - DNA, 861 bp, Homo Sapiens
atgatgccagaattccagaaaagttcagttcgaatcaagaaccctacaagagtagaagaaattatctgtggtcttatcaaaggaggagctgccaaacttcagataataacggactttgatatgacactcagtagattttcatataaagggaaaagatgcccaacatgtcataatatcattgacaactgtaagctggttacagatgaatgtagaaaaaagttattgcaactaaaggaaaaatactacgctattgaagttgatcctgttcttactgtagaagagaagtacccttatatggtggaatggtatactaaatcacatggtttgcttgttcagcaagctttaccaaaagctaaacttaaagaaattgtggcagaatctgacgttatgctcaaagaaggatatgagaatttctttgataagctccaacaacatagcatccccgtgttcatattttcggctggaatcggcgatgtactagaggaagttattcgtcaagctggtgtttatcatcccaatgtcaaagttgtgtccaattttatggattttgatgaaactggggtgctcaaaggatttaaaggagaactaattcatgtatttaacaaacatgatggtgccttgaggaatacagaatatttcaatcaactaaaagacaatagtaacataattcttctgggagactcccaaggagacttaagaatggcagatggagtggccaatgttgagcacattctgaaaattggatatctaaatgatagagtggatgagcttttagaaaagtacatggactcttatgatattgttttagtacaagatgaatcattagaagtagccaactctattttacagaagattctataa

SEQ ID NO: 51 - protein, 493 aa, Homo Sapiens
MHTLVFLSTRQVLQCQPAACQALPLLPRELFPLLFKVAFMDKKTVVLRELVHTWPFPLLSFQQLLQECAHCSRALLQERPSTESMQAVILGLTARLHTSEPGASTQPLCRKHALRVLDMTGLLDDGVEQDPGTMSMWDCTAAVARTCIAQQQGGAAEPGPAPIPVEVRVDLRVNRASYAFLREALRSSVGSPLRLCCRDLRAEDLPMRNTVALLQLLDAGCLRRVDLRFNNLGLRGLSVIIPHVARFQHLASLRLHYVHGDSRQPSVDGEDNFRYFLAQMGRFTCLRELSMGSSLLSGRLDQLLSTLQSPLESLELAFCALLPEDLRFLARSPHAAHLKKLDLSGNDLSGSQLAPFQGLLQASAATLLHLELTECQLADTQLLATLPILTQCASLRYLGLYGNPLSMAGLKELLRDSVAQAELRTVVHPFPVDCYEGLPWPPPASVLLEASINEEKFARVEAELHQLLLASGRAHVLWTTDIYGRLAADYFSL

SEQ ID NO: 52 - DNA, 5323 bp, Homo Sapiens
cggggctggaggcggtggctgcggttgcgggaccggcactatgctgggccttcctaccacttgtgtgtggcttggtagtggcctagggtctctcctccctgctgaagtccctctcctgcaggtggccgtctgcccggcccagcaccatgcacacgcttgtgttcttgagcacacggcaggtgctgcagtgccagccagctgcctgccaggccctgcccctgctgccacgcgaactcttccccctgctgttcaaggtggccttcatggacaagaagacagtggtactgcgcgagttggtacacacgtggcccttcccgctgctcagtttccagcagctgctacaggagtgtgcccactgcagccgtgccctcctgcaggagcggcctagcactgagagcatgcaggctgttatcctggggctgactgcccggctccacacctcagagcctggggccagcacacagcccctctgcaggaagcatgcgctgcgggtgctggacatgacgggcctcttggatgatggtgtggaacaggatcctggcaccatgagcatgtgggactgtactgctgccgtagctcgcacatgcattgcccagcagcagggtggggccgcagagcctgggccagcccccatccccgtggaggtgcgcgtggacctgcgggtgaaccgggcctcctatgcgttcctgcgggaggcactccgaagcagcgtgggcagcccgctgcggctctgctgccgggacctgcgagctgaggacctgcccatgcgcaacactgtggccctgctgcagcttctggatgcaggctgcctgcgccgcgtggacctgcgcttcaacaatctgggcctgcgcggcctgtctgtgatcatcccacacgtggcccgcttccagcacctggccagcctgcggctccactatgtgcatggggattcaaggcagccctccgtggatggcgaggacaacttccgctacttccttgcccagatgggccgcttcacctgtctgcgtgagctcagcatgggctcctctctcctttcagggaggctggaccagctgctcagcaccctgcagagccccctggagagcctggagttggccttctgtgctctgctgcctgaggacctacgcttcctggcacggagcccacatgctgcccacctcaagaagttggacctgagtggtaacgacctgtctggcagccagctggcacccttccagggtctgttgcaggcatcagcagccacactgttgcatctggagctgactgagtgtcagctcgcagacacccagctgttggccacactacccatcctgactcagtgcgccagtctccggtaccttggcctctatggcaacccactgtccatggcgggcctcaaggagctgctgcgggactcagtggcacaggctgagctgcgtactgtggtgcaccccttccctgtggactgctatgagggcttgccctggccgccgcctgcctctgtcctgctggaggcctccatcaatgaggagaagtttgcccgcgtagaagctgagttgcaccagctgcttctagcctcaggccgtgcccatgtgctctggaccacggacatctacgggcgactggctgcggactacttcagcctatgatgaagtagctctgggtgagacacaggccgccctgcagtctctttaggtaggcagggcctttgctgggacccctggtggaggccttcacaaaagcactggttactggtttcctgctgggtctaccttgcttctgggcacacctcaagcctcccctgctttctgcagtgccccacgcggttttccctgcacttgctccataattggctgatcatctgtgggccccggggctggatgtcaggcctccattgccctgctcagtttggctgcatttggctgccgtctggggtcctggtcctttgtgcaaatgctttgggattccagttgtgagctgagagagatgatggcctctctgggcctttcctctccctttactgagagctcagtgcttctggggttgaagttggacagaggcctgcttcagggaagctgggagtccccaggcactcacgcctcttacgtgttccctaccctgccacccagccaccccactgggctgggctcgggctggagggggtcatcaaggtacacatgtgcctggaagttgaatttgtggctgtttttttttctgtccacgttggtcacccttatccttatctctgctgtcacccccaacatggccaccgggcaacaactgccatccagcctgtcgccccgcccttcgcggggcagccccgtcggcactgccggccagtccttgctcttcccacctttcggaggcccaagatcctactgtggccggccagggccagcgagggaccccccccatgcagagctggaggttggggtgatgtcttttcggaagagcttcaagggaggtgttggggcctccccggccaccttccattgctaccccaggattcccgagtgcaacgttcccggctcgcgccccacacacggctcagcgcacactgcgcggcttccacctttactgacggagcatgcgcgaggccgcaccggccaatctccggcgcccacgtcatccgcgcgcccgcggccctagcagtggatctcgtaggcgaccggcgggggcacgcggagtcccggccccgccccctgttccgggccgcagtcagcgggcgcctccgccggaccctcggcgaagagcggcttggagcggttgatgacgaacatctcgtggccgcgctcgtcgcggagctcctctagctgtgcgaacgtacaggggccgtccaagtagtcgttgacgaacagcgctccctcccccggaggcccccgcgccttttttcgcctgcggcgccggcgacagatcatggcgaccaggagcagcgccgtgagcgccagcagcgcgatggccgccgcaatggccgtctgtgtggccacgcccagggcgcggaaggccatgctgcccgcctcgggccggggctcgctgccggcggggcgggcggccggaggcggcggttgcgcgggctgctgcggctgctgccgggacgcgttgaccaggagccggaagggcacgcgggcagcgccgccggcgttggaggcctcgcactcgtacttaccggcgtgcgccagcgtgatgttgctgaggaagagcatgccgctgcccgtgtcggatgccgagtgtccgcccaggcccagcaacccgccttctagctgggcctgggctcgcggccggccctcgcgaggctggggcacctttctccaggtcaccaatggctgcgggtagccggaggcttggcaggcaacccgcaggtcctcacccaggttggctgtgagctccagcggctgcacgtggacagagggcggaatgcagatgaggctgctgtgggatacgtccaggagactctggagcgccaggcgcgggggctctgcacacatgatcttcctgtccctggaggtgagcagccgctggccgccctccttgatccaggcccccagccagtgcagggcgcagtcacagcgccatgggttctctgtgggagagcagcgttaggcaggtggcttgagggtgctgctaaaacagcctgtgcagttggggttttgcaggccaggacagaggcctctttcccacctcccacagcgttttcacacggagtccaaggccctgccaccccttccttgaccccaagctccttggggcggcaggcccttcaccctcgcccccctcccctttagctctgtgatgcctgcctgttacagatcacttctccgtcggtctctgagaaagcacctgctccttaagtcttcctgcaacaagtgccactgtttttaggaacctgggcgtccacatagacatctcaccagcactgaaacctcacaagtcctctcagctttgcctttggatgccctctcttgggaatgtccccagtcctggtcagctgtctctctcctttgcaattttgtctgcctcccctcagcctaaaagtgtgcagaaccctcaattctgttaagtcaccctgtggagttcctgtcttctgttttccccaggcagggtgcctgagctgtatcccccagcacacccactcccgcagccctccagtgtggctgcaggcggtggtgcagccttccagactgctgcccagttgcctgatgtcagagcccctccacacatgagcctgctccctactgccaacaccgtggcccagacagagacgctttccgaggaagaggtacctgtgaggcgcaggacttgcagactggccaggggctgcagggcctctcggctgatggtgcccagctggttcctgctgaggtccagcagtgctagggaggacagccccgctagagcctggtcctccagcagctcaatgctgttttcttgcaggtgaagctcctgcagtcgctgaagtaaggacagcagatcgtgaggaaaaagggcgccgaggttgggggcatgtctctcttcttaccaagctagactgggttgccttttctaactattccagccctacagggcgaggggccataatggagtatcccgcccctttagaccccaggcgctcaccggcaggtgcaagaaggtgaaatccagcagccgcgccagctggttgcccgccaggtagagcacgcgcagctgggccaggcctacgaaggcgccgctgcgcaagccgcgcagccggttgctagtgagcgccagctccagcaggcgcggctgcgcgcggaaggcgccggcctccagggcgcgcaggctgttgttgtgcaggtagagccggcgcagagcggcgagtggcgccagggctcccggctctaggcgggcgatgttgttgtcctgcaggaacagtgtctgcaggccggggaaagaggaggcgcttaccccgctgcgggggtcttcctctccctgggggcaccccgtcctcccgcagctccacacggtgcccacctgcgtccctggcgggattcccagcgggacgacgcgcaaccgcagggcgccacactccaccgtggcgctgtagcagcggcaggctgctgggcagccggcggcgcggagcggcagtagtagcagcagcagcggcagcagttcgggggccctcagggccatctcccgaggcccggttcctcaccggcccttccgcggttcagccgcagacgcgtgccctcctgaaacacaggttggcaggccagtctcggcagtcgagagccagccaatagatggaatggaggcctgcacctgcgtctaacttttgacactataaataggttcaagaaactaataaaacgttctggttttctcctttgac

SEQ ID NO: 53 - protein, 162 aa, Homo Sapiens
MLQTSNYSLVLSLQFLLLSYDLFVNSFSELLQKTPVIQLVLFIIQDIAVLFNIIIIFLMFFNTFVFQAGLVNLLFHKFKGTIILTAVYFALSISLHVWVMNLRWKNSNSFIWTDGLQMLFVFQRLAAVLYCYFYKRTAVRLGDPHFYQDSLWLRKEFMQVRR

SEQ ID NO: 54 - DNA, 489 bp, Homo Sapiens
atgctccagaccagtaactacagcctggtgctctctctgcagttcctgctgctgtcctatgacctctttgtcaattccttctcagaactgctccaaaagactcctgtcatccagcttgtgctcttcatcatccaggatattgcagtcctcttcaacatcatcatcattttcctcatgttcttcaacaccttcgtcttccaggctggcctggtcaacctcctattccataagttcaaagggaccatcatcctgacagctgtgtactttgccctcagcatctcccttcatgtctgggtcatgaacttacgctggaaaaactccaacagcttcatatggacagatggacttcaaatgctgtttgtattccagagactagcagcagtgttgtactgctacttctataaacggacagccgtaagactaggcgatcctcacttctaccaggactctttgtggctgcgcaaggagttcatgcaagttcgaaggtga

SEQ ID NO: 55 - protein, 307 aa, Homo Sapiens
MGGFQRGKYGTMAEGRSEDNLSATPPALRIILVGKTGCGKSATGNSILGQPVFESKLRAQSVTRTCQVKTGTWNGRKVLVVDTPSIFESQADTQELYKNIGDCYLLSAPGPHVLLLVIQLGRFTAQDTVAIRKVKEVFGTGAMRHVVILFTHKEDLGGQALDDYVANTDNCSLKDLVRECERRYCAFNNWGSVEEQRQQQAELLAVIERLGREREGSFHSNDLFLDAQLLQRTGAGACQEDYRQYQAKVEWQVEKHKQELRENESNWAYKALLRVKHLMLLHYEIFVFLLLCSILFFIIFLFIFHYI

SEQ ID NO: 56 - DNA, 1812 bp, Homo Sapiens
gttcccaatcagtttccagccaacaccagggtgtcctagtccgcagaggtgtgggggacacactccataatctctacttttctttttgtgcagctgagtcatggagctttcagccccagcacatggctcctccttaactgcgtctgctcaacctccctcagccctgtgaacagcatccccgcacacagacgcagagcaggactctctctgctgccacttcaccttcctgagagaggaccagcggccagagcctcagtgactgccaccctggaggacagggcacaacaaccgtttctgaagagaatgggaggattccagaggggcaaatatggaactatggctgaaggtagatcagaagataacttgtctgcaacaccaccggcattgaggattatcctagtgggcaaaacaggctgcgggaaaagtgccacagggaacagcatccttggccagcccgtgtttgagtccaagctgagggcccagtcagtgaccaggacgtgccaggtgaaaacaggaacatggaacgggaggaaagtcctggtggttgacacgccctccatctttgagtcacaggccgatacccaagagctgtacaagaacatcggggactgctacctgctctctgccccggggccccacgtcctgcttctggtgatccagctggggcgtttcactgctcaggacacagtggccatcaggaaggtgaaagaggtctttgggacaggggccatgagacatgtggtcatcctcttcacccacaaagaggacttagggggccaggccctggatgactatgtagcaaacacggacaactgcagcctggaagacctggtgcgggagtgtgagagaaggtactgtgccttcaacaactggggctctgtggaggagcagaggcagcagcaggcagagctcctggctgtgattgagaggctggggagggagcgagagggctccttccacagcaatgacctcttcttggatgcccagctgctccaaagaactggagctggggcctgccaggaagactacaggcagtaccaggccaaagtggaatggcaggtggagaagcacaagcaagagctgagggagaacgagagtaactgggcatacaaggcgctcctcagagtcaaacacttgatgcttttgcattatgagatttttgtttttctattgttgtgcagcatactttttttcattatttttctgttcatctttcattacatttaaatctctggaccctggagcacttctaatgtatcaccccatggagtcattgttctaataatcaccaattcagactcagatcctcgtggtctatggagcatgctgcttgctgtctgtgcagctcccatttccccttcttcctgatagacttggagctgtgtgcctccactccaaggctgcctgcctgctgtaaacactattccactctgtctgccaacaactgcttcaggaatgggcctgagatcccatgcaggtccctgagaagtgagtaaaagtccgcagaggtggggatggaagatctctccttagatagaacctgtcttcctccctggcattgtggggtctgggcgtgacactgggactctcagcagctttgtgctgccaacctgagattgaaggcagtgcctcagagcagcacagagagttggggccccctgagccctgagccaccagccctgcagcctgccctatctccgcatttccagttgtattagccaatagatttcctacttatttaagctatttgagctccgggtctcttctacctgcattctaaaacattcaaagtaataaaaatttctccacatt

SEQ ID NO: 57 - protein, 791 aa, Homo Sapiens
ELGIPALLDPNDMVSMSVPDCLSIMTYVSQYYNHFCSPGQAGVSPPRKGLAPCSPPSVAPTPVESEDVAQGEELSSGSLSEQGTGQTPSSTCAACQQHVHLVQRYLADGRLYHRHCFRCRRCSSTLLPGAYENGPEEGTFVCAEHCARLGPGTRSGTRPGPFSQPKQQHQQQLAEDAKDVPGGGPSSSAPAGAEADGPKASPEARPQIPTKPRVPGKLQELASPPAGRPTPAPRKASESTTPAPPTPRPRSSLQQENLVEQAGSSSLVNGRLHELPVPKPRGTPKPSEGTPAPRKDPPWITLVQAEPKKKPAPLPPSSSPGPPSQDSRQVENGGTEEVAQPSPTASLESKPYNPFEEEEEDKEEEAPAAPSLATSPALGHPESTPKSLHPWYGITPTSSPKTKKRPAPRAPSASPLALHASRLSHSEPPSATPSPALSVESLSSESASQTAGAELLEPPAVPKSSSEPAVHAPGTPGNPVSLSTNSSLASSGELVEPRVEQMPQASPGLAPRTRGSSGPQPAKPCSGATPTPLLLVGDRSPVPSPGSSSPQLQVKSSCKENPFNRKPSPAASPATKKATKGSKPVRPPAPGHGFPLIKRKVQADQYIPEEDIHGEMDTIERRLDALEHRGVLLEEKLRGGLNEGREDDMLVDWFKLIHEKHLLVRRESELIYVFKQQNLEQRQADVEYELRCLLNKPEKDWTEEDRAREKVLMQELVTLIEQRNAIINCLDEDRQREEEEDKMLEAMIKKKEFQREAEPEGKKKGKFKTMKMLKLLGNKRDAKSKSPRDKS

SEQ ID NO: 58 - DNA, 5779 bp, Homo Sapiens
ggagctggggatccccgctctcctggaccccaatgacatggtctccatgagcgtccctgactgcctcagcatcatgacctatgtgtcccagtattacaaccacttctgcagtcctggccaagctggtgtctcgccacccagaaagggccttgcaccctgttccccgccgtctgtagcacccactccagtggaatcagaagatgtggctcagggcgaggagctctcctcaggcagcctgtcagagcagggcaccggccagacccccagcagcacgtgcgcagcctgccagcagcatgtgcacttggtgcagcgctacctggctgacggcaggctgtaccatcgccactgcttccggtgtcggcggtgctccagcaccctgctccctggggcttatgagaatgggcctgaggagggcacctttgtgtgtgcagaacactgtgccaggctgggcccggggacacggtcggggaccaggcctgggcccttctcacagccaaagcagcagcaccagcagcaactcgcagaagatgccaaggatgttccaggaggcggccccagctccagtgctcctgcaggggctgaggccgatggacccaaggccagccctgaggcccggccgcagatccctaccaagccccgggttcctggcaaactacaggagctggccagcccccctgcgggccgccccacccctgcccccaggaaggcctctgagagcaccaccccagcaccccccacgccccggccccgctccagtctgcagcaggagaacctggtggagcaggctggcagcagcagcctggtgaacgggagactgcacgaactgcctgtccccaagccgagggggacaccgaagccgtccgaggggacaccagcccccaggaaggaccccccatggatcacgctggtgcaggcagaaccaaagaagaagccagccccacttcccccaagcagcagcccggggccaccaagccaggacagcaggcaggtggagaatggaggcaccgaggaggtggcccagccgagcccaacggccagcctggagtccaaaccctataacccctttgaggaggaggaggaggacaaggaggaagaggctccagctgcacccagcctggccaccagccctgccctgggccacccggagtccacacccaagtccctgcacccctggtacggcatcacccctaccagcagccccaagacaaagaagcgccctgccccgcgcgcacccagcgcgtccccactggctctccacgcctcccgcctctcgcactcggagccgccctcggccacaccatcgccagcgctcagcgtggagagcctgtcgtctgagagcgccagccagactgcaggtgcagagcttctggagccgccagctgtgcccaagagctcctcagagcctgctgtccatgcccctggtacccctggaaaccctgtcagcctctctaccaactcctccctggcctcctctggggaactagtggagcctagagtggaacaaatgcctcaagccagccctggccttgcccccaggaccaggggcagctcaggtccccagccagccaagccctgcagtggcgccaccccaacgcctctcttgttggttggagacaggagcccggtgccttcccctggaagctcgtccccacagctgcaggtaaagtcctcctgcaaggagaatccttttaaccggaagccatcacctgcagcgtccccagccacaaagaaggccaccaagggatccaagccagtgaggccacctgcccctggacacggctttccactcatcaaacgcaaggtccaggctgaccagtacatccctgaggaggacatccatggagagatggataccattgagcgccggctggatgccctggagcaccgtggggtgctgctggaggagaagctgcgtggcggcctgaatgagggccgtgaggatgacatgctggtggactggttcaagctcatccacgagaagcacctactggtgcggcgagagtccgagctcatctatgtcttcaagcagcagaacctggagcagcgccaggctgatgtcgagtatgagctccggtgcctcctcaataagccagaaaaggactggacggaggaggaccgggcccgggagaaggtgctgatgcaggagcttgtgaccctcattgagcagcgcaacgctatcatcaactgcctggatgaggaccggcagagggaggaagaggaagacaagatgttggaagccatgatcaagaagaaagagttccagagggaggctgaacctgagggcaagaagaaggggaagttcaagaccatgaagatgttgaaactgctaggaaacaaacgtgatgccaagagcaagtcccccagagacaagagctaacagcacgagaagccagttggggactgccccctcctggagcagctcctgggctgtgctctgtttgaagggggcgccctgctcccctcagatcagtcaggaggaagatgactaaggggagggatcctctgggtgatggcctcttcctcctcagggacctctgactgctctgggccaaagaatctcttgtttcttctccgagccccaggcagcggtgattcagccctgcccaacctgattctgatgactgcggatgctgtgacggacccaaggggcaaatagggtcccagggtccagggaggggcgcctgctgagcacttccgcccctcaccctgcccagcccctgccatgagctctgggctgggtctccgcctccagggttctgctcttccaggcaggccagcaagtggcgctgggccacactggcttcttcctgccccatccctggctctgagtctctgtcttcctgtcctgtgcaggcgcccttggatctcagtttccctcactcaggaactctgtttctgaagtcttcagttaagtttgagtttatgactgagtggcctgtactgtcagacgtgaatgggcctgacgggcaaatccatccctctctccctcacagttccaggagcggcttccctcgtctccccttactccacagggagcctcccttgccaggaccagggctgcgacggccatgctggggcaggtgagtgctctgttagctgctcccagtgctgtccccaggctgcagttctggtccctggttgtcaggtaggaagggtgcacttgaagcaggtgctcatctcggttccttaacgtttatagtctgacccctcacttaggctttcctctgccaccccggtccagggaagaggctcgctcccgcccatggtcatcactggtctgtctgctctgttgtctgttctttccctgactccctcccaccgaaggcctgatggctactcacccctctgggatggctatgggagaggaggagtgatggggaccgccaccttttctgcaggaaatgtgcccagcagctcttggtcaaagcactgttgctataagctatctctgggatgcctctaggcccccttccctctacacacctctgggaaaagattacactgtattaactctcgaggagtttcctcaccaataaacagacaacctcaactgccagtgccctgcagcctcgggccacagcggcagccttgtttgccttcccacctgcctctgccacacctggtggctgaacatctctggtcgcccagaggccatgttggggccatcctccaagagggatctctgccctcaccgcctgccactgggcaggatccctttcctctgcagggagaggtggctcctcggccatgcagcccctggcaggctccttctaaacatgcctgttgacctggagctggcgccaccaactccagggcctttccagggccagacaggtaacacgcatgaacccgagtgacagctctgacgggctgtttcggtgtcaggagacaaagctggcaggggcaggggtgaactggaggcaagtcaagtcacctgtggcctgtggggctgaatgtgggcccggtgttgccagatcctttgtcataagaagctagaaatccagattttatgtgtgtgtaatttgtaaatgctgaaagctagcctgaattttttttttttttttgagacagagtctcgctctgtcgcccaggctggagtgcagtggcgcgatctcagctcactgcaggctccgcctcctgggttcacgccatcctcctgcctcggcctcctgagcagctgggactacaggcgcatgctacgacgcctggctaattttttgtatttttagtagagacggggtttcaccgtgttaaccaggatggtctcgatctcctgaccttgtgatccacccaccttggcctcccaaagtgctgggattacaggcgtgagccaccacgcccggccactagcctgaatttcaatcaagggttggctgatactgtgtgtccagggtggactggatttgtcctggggggttctctggtttgctgcctcctgaccacatgatggggccttcgaggtcgaggacaactgttcccattagattgcaccctctgccctcaggttcttgagggtgtgtggacacagaggctttccatgggatgtccctgagccggcccttgattggggcctcaccatttacagggccgttttattctgcaaaccgaaacttgggtcatgtgacctgatgggattatgggactccctccaggtgcccgagacaaggttgatatttccaaaatattttggtgatttagtgggacaagcaaatgacagaataccggagaaggcagggatcgtgggtgtcaggagccagaggggagggggacagatgtgctgtgtacaggacaaggtgtcaggtgactccttcccagcagggcctcgcagatgcacaagcacggagctggtgggttttgcccaagaaaggtcacgcggcacatgcagggattggaactcccaggccagggctctaggtcgctcccaccttttcatgtttctttctgtggccatgggtatagtggaaagacataaagctaaagccaacttttaatcctgaatgcactgcttgccaggtaaatgcccttggttgtggtatcttgttgagacttagttttcacagagggataatgaaccgttgcagaggtttattgagatcattaacagagtggaattcagcacctgccactgcactccagcctgggcgacagagcaagactcagtctcaaaaaaaaaaaaaattagctgggcagggcatggtgatggtgcctgtaatcctagctacttgggaggctgaggcatgagaattgcctgaacccaggaggtggaggttgcagtgagccgagatcgtgccactgtactccagcctgggtgacagcgcgagactccgtctcaaaaaaagctgggtgtggggaacacctgtggtcccagctattctggagactgaggcaggaggattgcttgagctcaggagttctggctgcagtgagctatgatcatgccactgtattacagaatgggtgacagaatgagagcgacactgtctcaaaaaaaaaaaaaaaaaaaggccgggagcggtcgtttgtgcctgtaatcccaacactttgggaggccagggtgggcggatcacttgaggccaggagttcaagaccagcctggccaacatggtgaatccccatctctactaaaaaaattaactggacatggtggtggacacttgtaatcccagctactcaggaggctgacacatgagaattgcttgaacccgggaggcggaggttacagtgagccgagatagcaccactgcactccaacctgggcacagagtaaggctctgtcttt

SEQ ID NO: 59 - protein, 854 aa, Homo Sapiens
MASEGPREPESEGIKLSADVKPFVPRFAGLNVAWLESSEACVFPSSAATYYPFVQEPPVTEQKIYTEDMAFGASTFPPQYLSSEITLHPYAYSPYTLDSTQNVYSVPGSQYLYNQPSCYRGFQTVKHRNENTCPLPQEMKALFKKKTYDEKKTYDQQKFDSERADGTISSEIKSARGSHHLSIYAENSLKSDGYHKRTDRKSRIIAKNVSTSKPEFEFTTLDFPELQGAENNMSEIQKQPKWGPVHSVSTDISLLREVVKPAAVLSKGEIVVKNNPNESVTANAATNSPSCTRELSWTPMGYVVRQTLSTELSAAPKNVTSMINLKTIASSADPKNVSIPSSEALSSDPSYNKEKHIIHPTQKSKASQGSDLEQNEASRKNKKKKEKSTSKYEVLTVQEPPRIEDAEEFPNLAVASERRDRIETPKFQSKQQPQDNFKNNVKKSQLPVQLDLGGMLTALEKKQHSQHAKQSSKPVVVSVGAVPVLSKECASGERGRRMSQMKTPHNPLDSSAPLMKKGKQREIPKAKKPTSLKKIILKERQERKQRLQENAVSPAFTSDDTQDGESGGDDQFPEQAELSGPEGMDELISTPSVEDKSEEPPGTELQRDTEASHLAPNHTTFPKIHSRRFRDYCSQMLSKEVDACVTDLLKELVRFQDRMYQKDPVKAKTKRRLVLGLREVLKHLKLKKLKCVIISPNCEKIQSKGGLDDTLHTIIDYACEQNIPFVFALNRKALGRSLNKAVPVSVVGIFSYDGAQDQFHKMVELTVAARQAYKTMLENVQQELVGEPRPQAPPSLLTQGPSCPAEDGPPALKEKEEPHYIEIWKKHLEAYSGCTLELEESLEASTSQMMNLNL

SEQ ID NO: 60 - DNA, 3457 bp, Homo Sapiens
ccaagccgacggcccgctgctggcctccgtgacgcggcctcctccgcgcctcgcggcatggcgtcggaggggccgcgggagcccgaaagcgagggcatcaagttatcagcagatgtcaaaccatttgtccccagatttgccgggctcaatgtggcatggttagagtcctcagaagcatgtgtcttccccagctctgcagccacatactatccgtttgttcaggaaccaccagtgacagagcagaaaatatatactgaagacatggcctttggagcttcaacttttccacctcagtatttatcttctgagataactcttcatccatatgcctattctccttatacccttgactccacacagaatgtttactcagtgcctggctcccagtatctttataaccaacccagttgttaccgaggttttcaaacagtgaagcatcgaaatgagaacacatgccctctcccacaagaaatgaaagctctgtttaagaagaaaacctatgatgagaaaaaaacgtatgatcagcaaaagtttgacagtgaaagggctgatggaactatatcatctgagataaaatcagctagaggttcacatcatttgtccatttacgctgagaatagtttgaaatcagatggttaccataagcgaacagacaggaaatccagaatcattgcaaaaaatgtatctacctccaaacctgagtttgaatttaccacactggactttcctgaactgcaaggtgcagagaacaatatgtcagagatacagaagcaacccaagtggggacctgtccactctgtctctaccgacatttctcttctaagagaagtagtaaaaccagctgcagtgttatcaaagggtgaaatagtggtgaaaaataacccaaatgaatctgtaactgctaatgccgctaccaattctccttcatgtacaagagagttatcttggacaccaatgggttatgttgttcgacagacattatctacagaactgtcagcagcccctaaaaatgttacttctatgataaacttaaagaccattgcttcatcagcagatcctaaaaatgttagtataccatcttctgaagctttatcttcggatccttcctacaacaaagaaaaacacattattcatcctacccaaaagtctaaagcatcacaaggtagtgaccttgaacaaaatgaagcctcaagaaagaataagaaaaagaaagaaaaatctacatcaaaatatgaagtcctgacagttcaagagcctccaaggattgaagatgccgaggaatttcccaacctggcagttgcatctgaaagaagagacagaatagagacaccgaaatttcaatctaagcagcagccacaggataattttaaaaataatgtaaagaagagccagcttccagtgcagttggacttggggggcatgctgacagccctggagaagaagcagcactctcagcatgcaaagcagtcctccaaaccagtggtagtctcagttggagcagtgccagtcctttccaaagaatgtgcatcaggggagagaggccgccgcatgagtcaaatgaagaccccgcacaatcccttggactccagcgccccactgatgaagaaagggaagcagagggagatccccaaggccaagaagccaacctcactgaagaagattattttgaaagaacggcaagagagaaagcagcgtctccaagaaaatgctgtgagtccagcttttaccagtgatgacacacaagatggagagagtggtggtgatgaccagtttcccgagcaggcagagctgtcagggccagaggggatggacgaactgatctccactccttcggttgaggacaagtctgaagagccaccaggcacagagctccagagggacacagaggcctcccaccttgctcccaatcacaccaccttccctaagatccacagccgcagattcagggattactgcagccagatgcttagtaaagaagtggatgcttgtgttaccgacctactcaaagaactggtccgtttccaagaccgtatgtaccagaaagatccagtcaaggccaagactaaacgtcgacttgtgttggggttgagggaggttctcaaacacctgaagctcaaaaaactgaaatgtgtcattatttctcccaactgtgagaagatacagtcaaaaggtgggctggatgacactttgcacacaattattgattatgcctgtgagcagaacattccctttgtgtttgctctcaaccgcaaagctctggggcgcagtttgaataaggcagttcctgtcagtgtggtggggatcttcagctatgatggggcccaggatcagttccacaagatggttgagctgacagtggcggcccgacaggcgtacaagaccatgctggagaatgtgcagcaggagctggtgggagagcccaggcctcaggcacctcccagcctactcacacagggccccagctgccctgcagaagatggccccccagccctgaaagaaaaagaagagccacactacattgaaatctggaaaaaacatctggaagcatacagtggatgtaccctggagctagaagaatccttggaggcttcaacctctcaaatgatgaatttgaatttatgagagttcttgcctgtgtgtctgtattttgggtaaggaggggaggtctgaaaaagactttggggctttttcttctgtttttcatgacaatgtaatttgtgtaactgttgaatctggaaattgatcagcattaaagggcacatgaagcagtgtctgcaggcgttcagtgctgcggagcctgttaaaggtcactcagatgtgcaggtgttaatcttctctaaaagcctggtgatacagctctggctttctgagcacactacggatctggaaaatactggaaaatgtgatacttagaatactttggctgctaaggaaacttcctctccattgcagaatagctgagccaagtgagtgagtttgcagaaagcaggtggtgagctcctgcctgctggaggttgccatggagggccattcctgcccggcaacagcaccgtcctgcagggagccacttggcagaagggtgcagggctgctggtgtcagagcaagagggctacagggaaagggccctttctcaggggatgtagcttttttaaaagatttgggaacacttggaggatttgctaaaatgagcctcagaaggaaaattggttttctaacctgtgactttttgaaatgaattattcctttcagtctttatttttcaaagaaacaatgtgtattgaagtacctagatttgtttgataatcaacaaatctttcctttttcaatgaacatattctgaatgtggtttctgtcttagaccaggaggacagagtttgctttcatattttccctgtaagtaagagggcttatttattttaaataaagagtaattattaaaaaaaaaaaaaaaaaaaa

SEQ ID NO: 61 - skipped

SEQ ID NO: 62 - DNA, 1565 bp, Homo Sapiens
ctctttgcttttgcatggcttggcttagtatccaaggtatattagggccacttgaaagcatgaagaccagttatatagggaacaggtttctctcagtggcacattttgctttttctgagccccaaatacattgcctgggcatgaacattgttaccgtaaattgcacatggtcatggactgaattatgtgactttaaaggatgtaactgcccaacatttgcagattctgggtggtctatgtgaccatttgtctcgtatccaaaaaccccggggctattggaacccttccaacactttttcctttgtcatagacaagtttatatataacttaccaagatgttggctgtcctggtgtattgccagacagctgtcttttggttcccattccaaatgtgctgctgtccttctttgcatttcacaatatcaaagaaaccaccacccttcttcctaacagcattttatgccttttattccacattaaatgggaattgtgcctacttaggagtgcccctccaattaattacatgtgtccaagaataatccaagctagagacacaaggtgggaaaacatttcaaaaaaaaaaagtcctcttaaggccagtaatttatctgaaaaggtattttatcacaccttgacaccttatatatgagcctattaggagctgcaggtggtttcatagggtaaaatccaagaaaagagaaggatgtgtggggtttctattagaagataattttgttctcattttaccttttcttttatgatccttctctgctagaacaggttaattctccaaatttgttttgttttgttttgttattttttagggaactcttttgcaaaagcaatggtcggatgtaaataacatttaaagtatagtgcacataacttccccggactgttccaatctgataatttgtaaatgctttagagtttttttaattaacacttgtgttgctaaattctatttatgtaagtctgctaaagttttttagcccacttaaaacttaagacaaccatttaaaataatggatgggttactatgagcaatttcgctttcagaacccccttgttttagtatatgaaaaagcctaatgcgcattaatgaggttgaagagactatgagaaatatgtatagtgtatattttaaaacagctttgcttgtattgtgaagatttaaaaacaaacttgagatttttaacgtaactattaacacagttttaacataagttatcccactgggtttaagagcatcttgaatgtataatcctttttgtaacccaggttggtttctacttttaccagtcacccaaacatatttatgtttttagttttatgtactcatttccctttgttttcctcaaacagcatgatttttttgcacatgtagaaattttttaaaagaaagaaattagtacatcattttctctggattttcttcacttccctcttcctttctactaactccttccttaaaggccatatcactccatttgcattatttgtgcaaatgccagggttggtttttatttttatttttgctatttacctaaaaaaaaaaaaaaaaa

SEQ ID NO: 63 - protein, 1568 aa, Homo Sapiens
MEVSRRKAPPRPPRPAAPLPLLAYLLALAAPGRGADEPVWRSEQAIGAIAASQEDGVFVASGSCLDQLDYSLEHSLSRLYRDQAGNCTEPVSLAPPARPRPGSSFSKLLLPYREGAAGLGGLLLTGWTFDRGACEVRPLGNLSRNSLRNGTEVVSCHPQGSTAGVVYRAGRNNRWYLAVAATYVLPEPETASRCNPAASDHDTAIALKDTEGRSLATQELGRLKLCEGAGSLHFVDAFLWNGSIYFPYYPYNYTSGAATGWPSMARIAQSTEVLFQGQASLDCGHGHPDGRRLLLSSSLVEALDVWAGVFSAAAGEGQERRSPTTTALCLFRMSEIQARAKRVSWDFKTAESHCKEGDQPERVQPIASSTLIHSDLTSVYGTVVMNRTVLFLGTGDGQLLKVILGENLTSNCPEVIYEIKEETPVFYKLVPDPVKNIYIYLTAGKEVRRIRVANCNKHKSCSECLTATDPHCGWCHSLQRCTFQGDCVHSENLENWLDISSGAKKCPKIQIIRSSKEKTTVTMVGSFSPRHSKCMVKNVDSSRELCQNKSQPNRTCTCSIPTRATYKDVSVVNVMFSFGSWNLSDRFNFTNCSSLKECPACVETGCAWCKSARRCIHPFTACDPSDYERNQEQCPVAVEKTSGGGRPKENKGNRTNQALQVFYIKSIEPQKVSTLGKSNVIVTGANFTRASNITMILKGTSTCDKDVIQVSHVLNDTHMKFSLPSSRKEMKDVCIQFDGGNCSSVGSLSYIALPHCSLIFPATTWISGGQNITMMGRNFDVIDNLIISHELKGNINVSEYCVATYCGFLAPSLKSSKVRTNVTVKLRVQDTYLDCGTLQYREDPRFTGYRVESEVDTELEVKIQKENDNFNISKKDIEITLFHGENGQLNCSFENITRNQDLTTILCKIKGIKTASTIANSSKKVRVKLGNLELYVEQESVPSTWYFLIVLPVLLVIVIFAAVGVTRHKSKELSRKQSQQLELLESELRKEIRDGFAELQMDKLDVVDSFGTVPFLDYKHFALRTFFPESGGFTHIFTEDMHNRDANDKNESLTALDALICNKSFLVTVIHTLEKQKNFSVKDRCLFASFLTIALQTKLVYLTSILEVLTRDLMEQCSNMQPKLMLRRTESVVEKLLTNWMSVCLSGFLRETVGEPFYLLVTTLNQKINKGPVDVITCKALYTLNEDWLLWQVPEFSTVALNVVFEKIPENESADVCRNISVNVLDCDTIGQAKEKIFQAFLSKNGSPYGLQLNEIGLELQMGTRQKELLDIDSSSVILEDGITKLNTIGHYEISNGSTIKVFKKIANFTSDVEYSDDHCHLILPDSEAFQDVQGKRHRGKHKFKVKEMYLTKLLSTKVAIHSVLEKLFRSIWSLPNSRAPFAIKYFFDFLDAQAENKKITDPDVVHIWKTNSLPLRFWVNILKNPQFVFDIKKTPHIDGCLSVIAQAFMDAFSLTEQQLGKEAPTNKLLYAKDIPTYKEEVKSYYKAIRDLPPLSSSEMEEFLTQESKKHENEFNEEVALTEIYKYIVKYFDEILNKLERERGLEEAQKQLLHVKVLFDEKKKCKWM

SEQ ID NO: 64 - DNA, 5121 bp, Homo Sapiens
gcgaggaggaaacggtgccggagcgcgcagggcttgctgccgccaccgccgctgcacaggctgccggagcgagcctgccgcgcgccgccctccccgctctccttcctgggcgagctgcggggatggggcggccgcgggagcccgagcgcgcgcaggaaccgccgccgccgccgcccgcgtctccgttgccgcgcgcctgagccgccgtcgccgccgcgcgccctgcccgggggcggcccccccagccccatggaggtctcccggaggaaggcgccgccgcgccccccgcgccccgcagcgccactgcccctgctcgcctatctgctggcactggcggctcccggccggggcgcggacgagcccgtgtggcggtcggagcaagccatcggagccatcgcggcgagccaggaggacggcgtgtttgtggcgagcggcagctgcctggaccagctggactacagcctggagcacagcctctcgcgcctgtaccgggaccaagcgggcaactgcacagagccggtctcgctggcgccccccgcgcggccccggcccgggagcagcttcagcaagctgctgctgccctaccgcgagggggcggccggcctcggggggctgctgctcaccggctggaccttcgaccggggcgcctgcgaggtgcggcccctgggcaacctgagccgcaactccctgcgcaacggcaccgaggtggtgtcgtgccacccgcagggctcgacggccggcgtggtgtaccgcgcgggccggaacaaccgctggtacctggcggtggccgccacctacgtgctgcctgagccggagacggcgagccgctgcaaccccgcggcatccgaccacgacacggccatcgcgctcaaggacacggaggggcgcagcctggccacgcaggagctggggcgcctcaagctgtgcgagggcgcgggcagcctgcacttcgtggacgcctttctctggaacggcagcatctacttcccctactacccctacaactatacgagcggcgctgccaccggctggcccagcatggcgcgcatcgcgcagagcaccgaggtgctgttccagggccaggcatccctcgactgcggccacggccaccccgacggccgccgcctgctcctctcctccagcctagtggaggccctggacgtctgggcgggagtgttcagcgcggccgctggagagggccaggagcggcgctcccccaccaccacggcgctctgcctcttcagaatgagtgagatccaggcgcgcgccaagagggtcagctgggacttcaagacggccgagagccactgcaaagaaggggatcaacctgaaagagtccaaccaatcgcatcatctaccttgatccattccgacctgacatccgtttatggcaccgtggtaatgaacaggactgttttattcttggggactggagatggccagttacttaaggttattcttggtgagaatttgacttcaaattgtccagaggttatctatgaaattaaagaagagacacctgttttctacaaactcgttcctgatcctgtgaagaatatctacatttatctaacagctgggaaagaggtgaggagaattcgtgttgcaaactgcaataaacataaatcctgttcggagtgtttaacagccacagaccctcactgcggttggtgccattcgctacaaaggtgcacttttcaaggagattgtgtacattcagagaacttagaaaactggctggatatttcgtctggagcaaaaaagtgccctaaaattcagataattcgaagcagtaaagaaaagactacagtgactatggtgggaagcttctctccaagacactcaaagtgcatggtgaagaatgtggactctagcagggagctctgccagaataaaagtcagcccaaccggacctgcacctgtagcatcccaaccagagcaacctacaaagatgtttcagttgtcaacgtgatgttctccttcggttcttggaatttatcagacagattcaactttaccaactgctcatcattaaaagaatgcccagcatgcgtagaaactggctgcgcgtggtgtaaaagtgcaagaaggtgtatccaccccttcacagcttgcgacccttctgattatgagagaaaccaggaacagtgtccagtggctgtcgagaagacatcaggaggaggaagacccaaggagaacaaggggaacagaaccaaccaggctttacaggtcttctacattaagtccattgagccacagaaagtatcgacattagggaaaagcaacgtgatagtaacgggagcaaactttacccgggcatcgaacatcacaatgatcctgaaaggaaccagtacctgtgataaggatgtgatacaggttagccatgtgctaaatgacacccacatgaaattctctcttccatcaagccggaaagaaatgaaggatgtgtgtatccagtttgatggtgggaactgctcttctgtgggatccttatcctacattgctctgccacattgttcccttatatttcctgctaccacctggatcagtggtggtcaaaatataaccatgatgggcagaaattttgatgtaattgacaacttaatcatttcacatgaattaaaaggaaacataaatgtctctgaatattgtgtggcgacttactgcgggtttttagcccccagtttaaagagttcaaaagtgcgcacgaatgtcactgtgaagctgagagtacaagacacctacttggattgtggaaccctgcagtatcgggaggaccccagattcacggggtatcgggtggaatccgaggtggacacagaactggaagtgaaaattcaaaaagaaaatgacaacttcaatatttccaaaaaagacattgaaattactctcttccatggggaaaatgggcaattaaattgcagttttgaaaatattactagaaatcaagatcttaccaccatcctttgcaaaattaaaggcatcaagactgcaagcaccattgccaactcttctaagaaagttcgggtcaagctgggaaacctggagctctacgtcgagcaggagtcagttccttccacatggtattttctgattgtgctccctgtcttgctagtgattgtcatttttgcggccgtgggggtgaccaggcacaaatcgaaggagctgagtcgcaaacagagtcaacaactagaattgctggaaagcgagctccggaaagagatacgtgacggctttgctgagctgcagatggataaattggatgtggttgatagttttggaactgttcccttccttgactacaaacattttgctctgagaactttcttccctgagtcaggtggcttcacccacatcttcactgaagatatgcataacagagacgccaacgacaagaatgaaagtctcacagctttggatgccctaatctgtaataaaagctttcttgttactgtcatccacacccttgaaaagcagaagaacttttctgtgaaggacaggtgtctgtttgcctccttcctaaccattgcactgcaaaccaagctggtctacctgaccagcatcctagaggtgctgaccagggacttgatggaacagtgtagtaacatgcagccgaaactcatgctgagacgcacggagtccgtcgtcgaaaaactcctcacaaactggatgtccgtctgcctttctggatttctccgggagactgtcggagagcccttctatttgctggtgacgactctgaaccagaaaattaacaagggtcccgtggatgtaatcacttgcaaagccctgtacacacttaatgaagactggctgttgtggcaggttccggaattcagtactgtggcattaaacgtcgtctttgaaaaaatcccggaaaacgagagtgcagatgtctgtcggaatatttcagtcaatgttctcgactgtgacaccattggccaagccaaagaaaagattttccaagcattcttaagcaaaaatggctctccttatggacttcagcttaatgaaattggtcttgagcttcaaatgggcacacgacagaaagaacttctggacatcgacagttcctccgtgattcttgaagatggaatcaccaagctaaacaccattggccactatgagatatcaaatggatccactataaaagtctttaagaagatagcaaattttacttcagatgtggagtactcggatgaccactgccatttgattttaccagattcggaagcattccaagatgtgcaaggaaagagacatcgagggaagcacaagttcaaagtaaaagaaatgtatctgacaaagctgctgtcgaccaaggtggcaattcattctgtgcttgaaaaactttttagaagcatttggagtttacccaacagcagagctccatttgctataaaatacttttttgactttttggacgcccaggctgaaaacaaaaaaatcacagatcctgacgtcgtacatatttggaaaacaaacagccttcctcttcgcttctgggtaaacatcctgaagaaccctcagtttgtctttgacattaagaagacaccacatatagacggctgtttgtcagtgattgcccaggcattcatggatgcattttctctcacagagcagcaactagggaaggaagcaccaactaataagcttctctatgccaaggatatcccaacctacaaagaagaagtaaaatcttattacaaagcaatcagggatttgcctccattgtcatcctcagaaatggaagaatttttaactcaggaatctaagaaacatgaaaatgaatttaatgaagaagtggccttgacagaaatttacaaatacatcgtaaaatattttgatgagattctaaataaactagaaagagaacgagggctggaagaagctcagaaacaactcttgcatgtaaaagtcttatttgatgaaaagaagaaatgcaagtggatgtaagcactctggggcctggcttaatctggcaaagttcttcagacgacttgggagcaaaatggctgcttgagctactctgtgtcgttaatttgttgtttgcacataggttccactttgggcactgtctttttaagagaccaaggcacatgcacagcttttagaaagcaa

SEQ ID NO: 65 - skipped

SEQ ID NO: 66 - DNA, 1341 bp, Homo Sapiens
acgcgtccgaagacattaagtaaaaaattggaactatgatttttctttgtcattttttaaaaaagaattattttattaacctgctggcatataatctggagttcttttcacaaccttactttttctgatttgctttattgaatgattgaatactcatttctttctaaaaatatgttgtaaattctcccttggcaagatttctccctatgagggtagttattatttgagtctgccaagtggttaccatggggcaaggtgccatgatgtattcttgggtgcattggttttttgcgcattgtaaatttaagacacttatagtaagtggactcattcatagatgagtttcagaaccttttacgttctcggtagaggcttctgtcggacaggcagaagagtgtattcctcacttttttttttgtcttcaaattccagtaaggcatagcacttttaagaaattagaatttttctatcatctatgcaaatgatatttatgttaatattaaatatcttatgttacactgggagtaatttgaggtgcaattatttttattactactttgaatagaggaccattatccttctttcttcagaaaactaagaagtaagtgtaacttttaaagtaagtatatatcagtgagagtaggcttgttttacaactatttctagccagtgagttgtgttttcatgtctcatcaaaagacaataccacattgcatcattttacaaaatatgttgtcattttcatttcagttgtaacataggaaaatagatatttcctagatgatttctgagtttcttactgcaaagaacagttataaattggtatacatgtgtctctgtaatagggataatattgatatatctgttgctacatatttaagaatcattctatcttatgttgtcttgaggccaagatttaccacgtttgcccagtgtattgaattggtggtagaaggtagttccatgttccatttgtagatctttaagattttatctttgataactttaatagaatgtggctcagttctggtccttcaagcctgtatggtttggattttcagtaggggacagttgatgtggagtcaatctctttggtacacaggaagctttataaaatttcattcacgaatctcttattttgggaagctgttttgcatatgagaagaacactgttgaaataaggaactaaagctttatatattgatcaaggtgattctgaaagttttaatttttaatgttgtaatgttatgttattgttaattgtactttattatgtattcaatagaaaatcatgatttattaataaaagcttaaattctcatctaaaaaaaaaaaaaaaaa

SEQ ID NO: 67 - protein, 468 aa, Homo Sapiens
MGRGWGFLFGLLGAVWLLSSGHGEEQPPETAAQRCFCQVSGYLDDCTCDVETIDRFNNYRLFPRLQKLLESDYFRYYKVNLKRPCPFWNDISQCGRRDCAVKPCQSDEVPDGIKSASYKYSEEANNLIEECEQAERLGAVDESLSEETQKAVLQWTKHDDSSDNFCEADDIQSPEAEYVDLLLNPERYTGYKGPDAWKIWNVIYEENCFKPQTIKRPLNPLASGQGTSEENTFYSWLEGLCVEKRAFYRLISGLHASINVHLSARYLLQETWLEKKWGHNITEFQQRFDGILTEGEGPRRLKNLYFLYLIELRALSKVLPFFERPDFQLFTGNKIQDEENKMLLLEILHEIKSFPLHFDENSFFAGDKKEAHKLKEDFRLHFRNISRIMDCVGCFKCRLWGKLQTQGLGTALKILFSEKLIANMPESGPSYEFHLTRQEIVSLFNAFGRISTSVKELENFRNLLQNIH

SEQ ID NO: 68 - DNA, 3334 bp, Homo Sapiens
gcacgagccccgggctgccggcgcgggcgccgcggcacgtccacaggctgggtcgcgaggtggcgatcgctgagaggcaggagggccgaggcgggcctgggaggcggcccggaggtggggcgccgctggggccggcccgcacgggcttcatctgagggcgcacggcccgcgaccgagcgtgcggactggcctcccaagcgtggggcgacaagctgccggagctgcaatgggccgcggctggggattcttgtttggcctcctgggcgccgtgtggctgctcagctcgggccacggagaggagcagcccccggagacagcggcacagaggtgcttctgccaggttagtggttacttggatgattgtacctgtgatgttgaaaccattgatagatttaataactacaggcttttcccaagactacaaaaacttcttgaaagtgactactttaggtattacaaggtaaacctgaagaggccgtgtcctttctggaatgacatcagccagtgtggaagaagggactgtgctgtcaaaccatgtcaatctgatgaagttcctgatggaattaaatctgcgagctacaagtattctgaagaagccaataatctcattgaagaatgtgaacaagctgaacgacttggagcagtggatgaatctctgagtgaggaaacacagaaggctgttcttcagtggaccaagcatgatgattcttcagataacttctgtgaagctgatgacattcagtcccctgaagctgaatatgtagatttgcttcttaatcctgagcgctacactggttacaagggaccagatgcttggaaaatatggaatgtcatctacgaagaaaactgttttaagccacagacaattaaaagacctttaaatcctttggcttctggtcaagggacaagtgaagagaacactttttacagttggctagaaggtctctgtgtagaaaaaagagcattctacagacttatatctggcctacatgcaagcattaatgtgcatttgagtgcaagatatcttttacaagagacctggttagaaaagaaatggggacacaacattacagaatttcaacagcgatttgatggaattttgactgaaggagaaggtccaagaaggcttaagaacttgtattttctctacttaatagaactaagggctttatccaaagtgttaccattcttcgagcgcccagattttcaactctttactggaaataaaattcaggatgaggaaaacaaaatgttacttctggaaatacttcatgaaatcaagtcatttcctttgcattttgatgagaattcattttttgctggggataaaaaagaagcacacaaactaaaggaggactttcgactgcattttagaaatatttcaagaattatggattgtgttggttgttttaaatgtcgtctgtggggaaagcttcagactcagggtttgggcactgctctgaagatcttattttctgagaaattgatagcaaatatgccagaaagtggacctagttatgaattccatctaaccagacaagaaatagtatcattattcaacgcatttggaagaatttctacaagtgtgaaagaattagaaaacttcaggaacttgttacagaatattcattaaagaaaacaagctgatatgtgcctgtttctggacaatggaggcgaaagagtggaatttcattcaaaggcataatagcaatgacagtcttaagccaaacattttatataaagttgcttttgtaaaggagaattatattgttttaagtaaacacatttttaaaaattgtgttaagtctatgtataatactactgtgagtaaaagtaatactttaataatgtggtacaaattttaaagtttaatattgaataaaaggaggattatcaaattcatatatgataaaagtgaatgttctaagtctctcaaactagcgttttatgtaataatatgtaatataaataaaactatggtaaatgtgacaagcatttaataggaaaatgctaaggaggcctcataaatgacccataattaccaacgtagaatttttcagtacatttagggttgctggatttagcaaataaaaataaagattgcccagttagatttgaatttcagataaacaattagttttttaatattttacatggaatatttggaaaatacttatactaaaaaattatttgtttgaaattcacatttaactgggagtcttgtattttatctggcaatcctaaaatacattggtatgaaacaaatcacttttagaagtatattgctattttgattgggttgtttttgtgtgtagaaacgtacaataacaactcaaaggcacaggagatttctaaacattgtgaaaagttgaatagattatatatttattctcataatactttcactaatactaaataaaatttggggaacactttttatttttatataatttccaatttacagaaaagtttcaaaaatagtacaaagagctctcttacccagattcactaattgttcatacgtgctttatctttcatgctttctctgtacacacacacacacacacaaatttttcctcaatcatttgaaagtcagttataggcatcatgccccttaaaccctaaatacttcagtgtgtaatactgaataattactaaaaatgattttctcagaaaaaaaaactcccacaattctggaactataatactgtaagccttagaataaataatactttcaagttccaatctaaagttctttttgagttttgttgcccgttttatgcttgatgtgtatagtaatagggtaggctatttattttattaaaattttttttagagacaaggttttgctgtgttgcccaagctggaacttgaacgactgggctgaagtgatcttcccacctcagcctcccaagtagctgggaatacaggtgtctgccaccatacccagtttcatttttgttttttatacccgaagttcatttcctttgtctccctaaaactgaactgtaattttgggaggttttcattagtggaagctcttcatttataaagctatttgaaggggtttaggaatttatatcacatggtaattgtagagaaaaagaagctatatacctcaaaatcgtgccctctttacatatgtcttatcaggtataacatgttgaaatgtcacattagtagtaaagtggggtttatttatatagtggttaagaaatgtcagtttacactgctgtatacttcttcttctgtgtccctaaggcctggtacagtgccaagcacatacttggtatccaataaatatttgttggatgaaaaaaaaaaaaaaaaaaaa

SEQ ID NO: 69 - skipped

SEQ ID NO: 70 - DNA, 2700 bp, Homo Sapiens
ggcacgaggagatggcggcagcggcgctggggagggcgaggcggaggcggcaaaacgggcggtcgagcagaacgtgtagccgcgtcccctccagtccgctccgggcagctgctgatgcaaggaatcccctgggctcccgtccactccactgctgaccagcccattcgcctgtgctgagtcttcctgcaggcctttccttgcctctgtgggaccctgtgggggtccatccggctggagaagaaaagcctctcatgctaacgttgcagaccccagagggtcctgtgtgggtgtggagatggccaatgagaatcacggcagcccccgggaggaagcgtccctgctgagtcactccccaggtacctccaatcagagccagccctgttctccaaagccaatccgcctggttcaggacctcccagaggagctggtgcatgcaggctgggagaagtgctggagccggagggagaatcgtccctactacttcaaccgattcaccaaccagtccctgtgggagatgcccgtgctggggcagcacgatgtgatttcggaccctttggggctgaatgcgaccccactgccccaagactcaagcttggtggaaactcccccggctgagaacaagcccagaaagcggcagctctcggaagagcagccaagcggcaatggtgtgaagaagcccaagattgaaatcccagtgacacccacaggccagtcggtgcccagctcccccagtatcccaggaaccccaacgctgaagatgtggggtacgtcccctgaagataaacagcaggcagctctcctacgacccactgaggtctactgggacctggacatccagaccaatgctgtcatcaagcaccgggggccttcagaggtgctgcccccgcatcccgaagtggaactgctccgctctcagctcatcctgaagcttcggcagcactatcgggagctgtgccagcagcgagagggcattgagcctccacgggagtctttcaaccgctggatgctggagcgcaaggtggtagacaaaggatctgaccccctgttgcccagcaactgtgaaccagtcgtgtcaccttccatgtttcgtgaaatcatgaacgacattcctatcaggttatcccgaatcaagttccgggaggaagccaagcgcctgctctttaaatatgcggaggccgccaggcggctcatcgagtccaggagtgcatcccctgacagtaggaaggtggtcaaatggaatgtggaagacacctttagctggcttcggaaggaccactcagcctccaaggaggactacatggatcgcctggagcatctgcggaggcagtgtggcccccacgtctcggccgcagccaaggactccgtggaaggcatctgcagtaagatctaccacatctccctggagtacgtcaaacggatccgagagaagcaccttgccatcctcaaggaaaacaacatctcagaggaggtggaggcccctgaggtggagccccgcctagtgtactgctacccagtccggctggctgtgtctgcaccgcccatgcccagcgtggagatgcacatggagaacaacgtggtctgcatccggtataagggagagatggtcaaggtcagccgcaactacttcagcaagctgtggctcctttaccgctacagctgcattgatgactctgcctttgagaggttcctgccccgggtctggtgtcttctccgacggtaccagatgatgttcggcgtgggcctctacgaggggactggcctgcagggatcgctgcctgtgcatgtctttgaggccctccaccgactctttggcgtcagcttcgagtgcttcgcctcacccctcaactgctacttccgccagtactgttctgccttccccgacacagacggctactttggctcccgcgggccctgcctagactttgctccactgagtggttcatttgaggccaaccctcccttctgcgaggagctcatggatgccatggtctctcactttgagagactgcttgagagctcaccggagcccctgtccttcatcgtgttcatccctgagtggcgggaacccccaacaccagcgctcacccgcatggagcagagccgcttcaaacgccaccagttgatcctgcctgcctttgagcatgagtaccgcagtggctcccagcacatctgcaagaaggaggaaatgcactacaaggccgtccacaacacggctgtgctcttcctacagaacgaccctggctttgccaagtgggcgccgacgcctgaacggctgcaggagctgagtgctgcctaccggcagtcaggccgcagccacagctctggttcttcctcatcgtcctcctcggaggccaaggaccgggactcgggccgtgagcagggtcctagccgcgagcctcaccccacttaacatatcctgcggggaggaggagccccaggggtgctagtctggactgctgggactcgggcccctggggcctcagagggaccccggctgccactgacatatgaagattatggttctgccagggctcccctccctgcctgtccccaagtcctcacctcaaactccctccaagtcccatgtatataggtcctgatgccttcccaaccccgcccctcaccctgttgccaccttgtttcatttgtaaaaggaaatacagaaacccccccaaaaaaaaaaaaaaaaaaaaaaaaaaa

SEQ ID NO: 71 - skipped

SEQ ID NO: 72 - DNA, 1932 bp, Homo Sapiens
tatcatgcatgtgggaaggtgggtgtggtgagaaaagttttaaggcaagagtagatggccatgttcaactttacaaaatttcttggaaaactggcagtattttgaactgcatcttctttggtaccggaacctgcagaaacagtgtgagaaattaagtcctggttcactgcgcagtagcaaagatggtcaaggccatggaaaaagcagaaatttaccaagaaagctgatacccatgtatagttcccactcatctcaaatacatctgctatctttttaagctaagtcctagacatatcggggataacatgggggttgattagtgaccacagttatcagaagcagagaaatgtaattccatattttatttgaaacttattccatattttaattggatattgagtgattgggttatcaaacacccacaaactttaattttgttaaatttatatggctttgaaatagaagtataagttgctaccattttttgataacattgaaagatagtattttaccatctttaatcatcttggaaaatacaagtcctgtgaacaaccactctttcacctagcagcatgaggccaaaagtaaaggctttaaattataacatatgggattcttagtagtatgtttttttcttgaaactcagtggctctatctaaccttactatctcctcactctttctctaagactaaactctaggctcttaaaaatctgcccacaccaatcttagaagctctgaaaagaatttgtctttaaatatcttttaatagtaacatgtattttatggaccaaattgacattttcgactattttttccaaaaaagtcaggtgaatttcagcacactgagttgggaatttcttatcccagaagaccaaccaatttcatatttatttaagattgattccatactccgttttcaaggagaatccctgcagtctccttaaaggtagaacaaatactttctattttttttttcaccattgtgggattggactttaagaggtgactctaaaaaaacagagaacaaatatgtctcagttgtattaagcacggacccatattatcatattcacttaaaaaaatgatttcctgtgcaccttttggcaacttctcttttcaatgtagggaaaaacttagtcaccctgaaaacccacaaaataaataaaacttgtagatgtgggcagaaggtttgggggtggacattgtatgtgtttaaattaaaccctgtatcactgagaagctgttgtatgggtcagagaaaatgaatgcttagaagctgttcacatcttcaagagcagaagcaaaccacatgtctcagctatattattatttattttttatgcataaagtgaatcatttcttctgtattaatttccaaagggttttaccctctatttaaatgctttgaaaaacagtgcattgacaatgggttgatatttttctttaaaagaaaaatataattatgaaagccaagataatctgaagcctgttttattttaaaactttttatgttctgtggttgatgttgtttgtttgtttgtttctattttgttggttttttactttgttttttgttttgttttgttttgttttgcatactacatgcagttctttaaccaatgtctgtttggctaatgtaattaaagttgttaatttatatgagtgcatttcaactatgtcaatggtttcttaatatttattgtgtagaagtactggtaatttttttatttacaatatgtttaaagagataacagtttgatatgttttcatgtgtttatagcagaagttatttatttctatggcattccagcggatattttggtgtttgcgaggcatgcagtcaatattttgtacagttagtggacagtattcagcaacgcctgatagcttctttggccttatgttaaataaaaagacctgtttgggatgt

SEQ ID NO: 73 - protein, 450 aa, Homo Sapiens
MREIVHIQAGQCGNQIGAKFWEVISDEHGIDPSGNYVGDSDLQLERISVYYNEASSHKYVPRAILVDLEPGTMDSVRSGAFGHLFRPDNFIFGQSGAGNNWAKGHYTEGAELVDSVLDVVRKECENCDCLQGFQLTHSLGGGTGSGMGTLLISKVREEYPDRIMNTFSVVPSPKVSDTVVEPYNATLSIHQLVENTDETYCIDNEALYDICFRTLKLATPTYGDLNHLVSATMSGVTTSLRFPGQLNADLRKLAVNMVPFPRLHFFMPGFAPLTRRGSQQYRALTVPELTQQMFDAKNMMAACDPRHGRYLTVATVFRGRMSMKEVDEQMLAIQSKNSSYFVEWIPNNVKVAVCDIPPRGLKMSSTFIGNSTAIQELFKRISEQFTAMFRRKAFLHWYTGEGMDEMEFTEAESNMNDLVSEYQQYQDATAEEEGEMYEDDEEESEAQGPK

SEQ ID NO: 74 - DNA, 1648 bp, Homo Sapiens
atgcgggagatcgtgcacatccaggccggccagtgcggcaaccagatcggggccaagttctgggaagtcatcagtgatgagcatggcatcgaccccagcggcaactacgtgggcgactcggacttgcagctggagcggatcagcgtctactacaacgaggcctcttctcacaagtacgtgcctcgagccattctggtggacctggaacccggaaccatggacagtgtccgctcaggggcctttggacatctcttcaggcctgacaatttcatctttggtcagagtggggccggcaacaactgggccaagggtcactacacggagggggcggagctggtggattcggtcctggatgtggtgcggaaggagtgtgaaaactgcgactgcctgcagggcttccagctgacccactcgctggggggggggacgggctccggcatgggcacgttgctcatcagcaaggtgcgtgaggagtatcccgaccgcatcatgaacaccttcagcgtcgtgccctcacccaaggtgtcagacacggtggtggaaccctacaacgccacgctgtccatccaccagctggtggaaaacacggatgaaacctactgcatcgacaacgaggcgctctacgacatctgcttccgcaccctcaagctggccacgcccacctacggggacctcaaccacctggtatcggccaccatgagcggagtcaccacctccttgcgcttcccgggccagctcaacgctgacctgcgcaagctggccgtcaacatggtgcccttcccgcgcctgcacttcttcatgcccggcttcgcccccctcaccaggcggggcagccagcagtaccgggccctgaccgtgcccgagctcacccagcagatgttcgatgccaagaacatgatggccgcctgcgacccgcgccacggccgctacctgacggtggccaccgtgttccggggccgcatgtccatgaaggaggtggacgagcagatgctggccatccagagcaagaacagcagctacttcgtggagtggatccccaacaacgtgaaggtggccgtgtgtgacatcccgccccgcggcctcaagatgtcctccaccttcatcgggaacagcacggccatccaggagctgttcaagcgcatctccgagcagttcacggccatgttccggcgcaaggccttcctgcactggtacacgggcgagggcatggacgagatggagttcaccgaggccgagagcaacatgaacgacctggtgtccgagtaccagcagtaccaggacgccacggccgaggaagagggcgagatgtacgaagacgacgaggaggagtcggaggcccagggccccaagtgaaactgctcgcagctggagtgagaggcaggtggcggccggggccgaagccagcagtgtctaaacccccggagccatcttgctgccgacaccctgctttccccatcgccctagggctcccttgccgccctcctgcagtatttatggcctcgtcctcccccacctaggccacgtgtgagctgctcctgtctctgtcttattgcagctccaggcctgacgttttacggttttgttttttactggtttgtgtttatattttcggggatacttaataaatctattgctgtcagataccctt

SEQ ID NO: 75 - protein, 238 aa, Homo Sapiens
MAEGETESPGPKKCGPYISSVTSQSVNLMIRGVVLFFIGVFLALVLNLLQIQRNVTLFPPDVIASIFSSAWWVPPCCGTASAVIGLLYPCIDRHLGEPHKFKREWSSVMRCVAVFVGINHASAKVDFDNNIQLSLTLAALSIGLWWTFDRSRSGFGLGVGIAFLATVVTQLLVYNGVYQYTSPDFLYVRSWLPCIFFAGGITMGNIGRQLAMYECKVIAENLIRNEEGKKYLLYRKAR

SEQ ID NO: 76 - DNA, 1394 bp, Homo Sapiens
actcactatagggctcgagcggccgcccgggcaggtgggatttcgggtaggtcctactttaggacaagatgtggtaccgttgaagcgtcagtctttgattcacagacagttgagcttttcagctgggaagcctttccatttttttttttttaacggctttctgaacctatgaaaccatggcagaaggagagacagagtcacctgggcccaaaaagtgtggcccatatatttcatctgtcactagccagagtgtgaacttgatgattcgaggagtagtgctattttttattggagtatttcttgcattagtgttaaatttacttcagattcagagaaatgtgacgctctttccacctgatgtgattgcaagcatcttttcttctgcatggtgggtacccccatgctgtggcacggcttcagctgtgattgggttattatacccctgcattgacagacatctaggagaaccacataaatttaaaagagagtggtccagtgtaatgcggtgtgtagcagtctttgttggtataaatcatgccagtgctaaagtggatttcgataacaacatacagttgtctctcacactggctgcactatccattggactgtggtggacttttgatagatctagaagtggttttggccttggagtaggaattgccttcttggcaactgtggtcactcaactgctagtatataatggtgtttaccaatatacatctccagatttcctctatgttcgttcttggttaccatgtatattttttgctggaggcataacaatgggaaacattggtcgacaactggcaatgtacgaatgtaaagttatcgcagaaaatctcatcaggaatgaagaaggcaaaaaatatcttttgtacagaaaagcaagatgaaaaggatgtgaaatggtagatataccaacaaaacttcagactgtaaaattgccaggatgcagttttccccttgaatggcgtgtgtgtatatatggataaatatatatatacacacacacatattactgcaatctgtgattgcttcatctgtaaatcagttgtaaacctttacatatttgacttaaataactgtaagatatatatgtactacattaaaaagtgttgattaatagatgaaatttttaaattaattttttaaaacatgccatacattgtatcacaatgttaatgtgccaagatattgttcctgtcatgcagagtataagaatgctttgaacaatttgtaggacttagtggaaataaaataagagggaaaggccaaaaacaaacaaacaaaaggcatatggggagctgggtattttctctttaggcttactgttgtggcctttttatttttcctaatccacgccggtatggggtttggggggccccaattgttgg

SEQ ID NO: 77 - protein, 223 aa, Homo Sapiens
MASKLLRAVILGPPGSGKGTVCQRIAQNFGLQHLSSGHFLRENIKASTEVGEMAKQYIEKSLLVPDHVITRLMMSELENRRGQHWLLDGFPRTLGQAEALDKICEVDLVISLNIPFETLKDRLSRRWIHPPSGRVYNLDFNPPHVHGIDDVTGEPLVQQEDDKPEAVAARLRQYKDVAKPVIELYKSRGVLHQFSGTETNKIWPYVYTLFSNKITPIQSKEAY

SEQ ID NO: 78 - DNA, 1707 bp, Homo Sapiens
cggcgctgggctgaggggaggggttgtcttaaaagtctctccttccccctgtaggggcggccggcgagtcccagtgagagcggagggtgccagaggtagggggccgagaaacaaagttcccggggcttcctccggggccgcggtcggggctgcgcgtttgaccgcccccctcctcgcgaagcaatggcttccaaactcctgcgcgcggtcatcctcgggccgcccggctcgggcaagggcaccgtgtgccagaggatcgcccagaactttggtctccagcatctctccagcggccacttcttgcgggagaacatcaaggccagcaccgaagttggtgagatggcaaagcagtatatagagaaaagtcttttggttccagaccatgtgatcacacgcctaatgatgtccgagttggagaacaggcgtggacagcactggctccttgatggttttcctaggacattaggacaagccgaagccctggacaaaatctgtgaagtggatctagtgatcagtttgaatattccatttgaaacacttaaagatcgtctcagccgccgttggattcaccctcctagcggaagggtatataacctggacttcaatccacctcatgtacatggtattgatgacgtcactggtgaaccgttagtccagcaggaggatgataaacccgaagcagttgctgccaggctaagacagtacaaagacgtggcaaagccagtcattgaattatacaagagccgaggagtgctccaccaattttccggaacggagacgaacaaaatctggccctacgtttacacacttttctcaaacaagatcacacctattcagtccaaagaagcatattgaccctgcccaatggaagaaccaggaagatgtggtcattcattcaatagtgtgtgtagtattggtgctgtgtccaaattagaagctagctgaggtagcttgcagcatcttttctagttgaaatggtgaactgataggaaaacaaatgagtagaaagagttcatgaagaggccctcctctgcctttcaaaaggctggtcacctacacatgtttaaggtgtctctgcacatgtctcaagcccatcacaagaaagcaagtacagtgtggatttcaaatggtgtgtaacttcagctccagctggtttttgacagctgttgctgtggtaatatttttgacatgtgatggtgatagtctctggttctccccatccccacaaaggctgttgaaccacagcaccaggaagcctgagaatgaatcctgagggctctagcccaggctttgtcccaggctttctggtgtgtgccctcctggtaacagtgaaattgaagctacttactcatagtggttgtttctctggtcttgagtgactgtgtccacagttcatttttttccggtaggaataactccttttctacatccacgctccatagagtctctccttttcagacatcctgggatgaaagaatttggcttttttttttcttttttttttggacatctgttttcactcttaggcttttaaacaatagttattgcttttatccctctcagattctaataactgagagcgatggggctatattgaatctctgtatgcactgagaactgagctatgaagagaatcttattaaactgctggtctgactttatggattgacactgttcctttcttttattgtgaaaaaaaaaaaaaaa

SEQ ID NO: 79 - protein, 809 aa, Homo Sapiens
MGSVAASAGVPRGCDILIVYSPDAEEWCQYLQTLFLSSRQVRSQKILTHRLGPEASFSAEDLSLFLSTRCVVVLLSAELVQHFHKPSLLPLLQRAFHPPHRVVRLLCGVRDSEEFLDFFPDWAHWQELTCDDEPETYVAAVKKAISEDSGCDSVTDTEPEDEKVVSYSKQQNLPTVTSPGNLMVVQPDRIRCGAETTVYVIVRCKLDDRVGTEAEFSPEDSPSVRMEAKVENEYTISVKAPHLSSGNVSLKIYSGDLVVCETVISYYTDMEEIGNLLSNAANPVEFMCQAFKIVPYNTETLDKLLTESLKNNIPASGLHLFGINQLEEEDMMTNQRDEELPTLLHFAAKYGLKNLTALLLTCPGALQAYSVANKHGHYPNTIAEKHGFRDLRQFIDEYVETVDMLKSHIKEELMHGEEADAVYESMAHLSTDLLMKCSLNPGCDEDLYESMAAFVPAATEELYVEMLQASTSNPIPGDGFSRATKDSMIRKFLEGNSMGMTNLERDQCHLGQEEDVYHTVDDDEAFSVDLASRPPVPVPRPETTAPGAHQLPDNEPYIFKVFAEKSQERPGNFYVSSESIRKGPPVRPWRDRPQSSIYDPFAGMKTPGQRQLITLQEQVKLGIVNVDEAVLHFKEWQLNQKRRSESFRFQQENLKRLRDSITRRQREKQKSGKQTDLEITVPIRHSQHLPAKVEFGVYESGPRKSVIPPRTELRRGDWKTDSTSSTASSTSNRSSTRSLLSVSSGMEGDNEDNEVPEVTRSRSPGPPQVDGTPTMSLERPPRVPPRAASQRPPTRETFHPPPPVPPRGR

SEQ ID NO: 80 - DNA, 453 bp, Homo Sapiens
  misc_feature 420: n = A,T,C or G
agaccccccagggtgcctccgagagctgcctcacagaggactccgaccagggagaccttccatcctcctccacctgttccacccagaggacgctgattccacctcctaaaacctgcctacttcaggactttaagactcacagtcttcagcctgttaatgatgtcttcatgttgagttttatagcatgactgttgaccttaagatccattctcattgctgataatgctgcagccctgctggtttgggcttgctcgaagattttattaaggcacgaagaagtgaaaaactaagggcttcattcaccatcaccaagtatatcgaaccatatacttgtttgccaaaagggtggaaggactttaattcggaaatactttacctcttaatttggccatattcaggaggcctaaaaggattgatccntaatgttatttcaccgtggtttttattgaatgg

SEQ ID NO: 81 - skipped

SEQ ID NO: 82 - DNA, 259 bp, Homo Sapiens
tttgtgtggtctttttttttttttctcagtgttttcaattcctccttggttgaatccatggatgcaaaacccacagatatgaagggctggctatatatgcattgatgattgtcctattatattagttataaagtgtcatttaatatgtagtgaaagttatggtacagtggaaagagtagttgaaaacataaacatttgggcctttcaagaaaggtagcttggtgaagtttttcaccttcaaactatgtcccagtcaggg

SEQ ID NO: 83 - skipped

SEQ ID NO: 84 - DNA, 362 bp, Homo Sapiens
  misc_feature 72, 132, 133, 205: n = A,T,C or G
gcttgagatctccagccttaccgcggctcgaaatggccccaactgctcctgcaccactggtgtctcctgcanctgcaccggctcctgcaagtgcaaagagtgcaaatgacctcctgcaagaagagctgctgnnctgctgccccgtggtgtgcaagtgtgccacggtgtgtctgcaaagggacgttggagaactgcagctgctgtnctgatgtgggaacaagctcttctcccagatgttaatagaacaagctgcacaacctgggattttttttcaatacgatacttgagccattttctgcatttctttttattgttaaatatgtgagtgacaataaaacaattttgactttgaatcttaaaaa

SEQ ID NO: 85 - protein, 239 aa, Homo Sapiens
MPLGHIMRLDLEKIALEYIVPCLHEVGFCYLDNFLGEVVGDCVLERVKQLHCTGALRDGQLAGPRAGVSKRHLRGDQITWIGGNEEGCEAISFLLSLIDRLVLYCGSRLGKYYVKERSKAMVACYPGNGTGYVRHVDNPNGDGRCITCIYYLNKNWDAKLHGGILRIFPEGKSFIADVEPIFDRLLFFWSDRRNPHEVQPSYATRYAMTVWYFDAEERAEAKKKFRNLTRKTESALTED

SEQ ID NO: 86 - DNA, 2770 bp, Homo Sapiens
gagtctggccgcagtcgcggcagtggtggcttcccatccccaaaaggcgccctccgactccttgcgccgcactgctcgccgggccagtccggaaacgggtcgtggagctccgcaccactcccgctggttcccgaaggcagatcccttctcccgagagttgcgagaaactttcccttgtccccgacgctgcagcggctcgggtaccgtggcagccgcaggtttctgaaccccgggccacgctccccgcgcctcggcttcgcgctcgtgtagatcgttccctctctggttgcacgctggggatcccggacctcgattctgcgggcgagatgcccctgggacacatcatgaggctggacctggagaaaattgccctggagtacatcgtgccctgtctgcacgaggtgggcttctgctacctggacaacttcctgggcgaggtggtgggcgactgcgtcctggagcgcgtcaagcagctgcactgcaccggggccctgcgggacggccagctggcggggccgcgcgccggcgtctccaagcgacacctgcggggcgaccagatcacgtggatcgggggcaacgaggagggctgcgaggccatcagcttcctcctgtccctcatcgacaggctggtcctctactgcgggagccggctgggcaaatactacgtcaaggagaggtctaaggcaatggtggcttgctatccgggaaatggaacaggttatgttcgccacgtggacaaccccaacggtgatggtcgctgcatcacctgcatctactatctgaacaagaattgggatgccaagctacatggtgggatcctgcggatatttccagaggggaaatcattcatagcagatgtggagcccatttttgacagactcctgttcttctggtcagatcgtaggaacccacacgaagtgcagccctcttacgcaaccagatatgctatgactgtctggtactttgatgctgaagaaagggcagaagccaaaaagaaattcaggaatttaactaggaaaactgaatctgccctcactgaagactgaccgtgctctgaaatctgctggccttgttcattttagtaacggttcctgaattctcttaaattctttgagatccaaagatggcctcttcagtgacaacaatctccctgctacttcttgcatccttcacatccctgtcttgtgtgtggtacttcatgttttcttgccaagactgtgttgatcttcagatactctctttgccagatgaagttatttgctaactccagaaattcctgcagacatcctactcggccagcggtttacctgatagattcggtaatactatcaagagaagagcctaggagcacagcgagggaatgaaccttacttgcactttatgtatacttcctgatttgaaaggaggaggtttgaaaagaaaaaaatggaggtggtagatgccacagagaggcatcacggaagccttaacagcaggaaacagagaaatttgtgtcatctgaacaatttccagatgttcttaatccagggctgttggggtttctggagaattatcacaacctaatgacattaatacctctagaaagggctgctgtcatagtgaacaatttataagtgtcccatggggcagacactccttttttcccagtcctgcaacctggattttctgcctcagctccattttgctgaaaataatgactttctgaataaagatggcaacacaattttttctccattttcagttcttacctgggaacctaattccccagaagctaaaaaactagacattagttgttttggttgctttgttggaatggaatttaaatttaaatgaaaggaaaaatatatccctggtagttttgtgttaaccactgataactgtggaaagagctaggtctactgatatacaataaacatgtgtgcatcttgaacaatttgagaggggaggtggagttggaaatgtgggtgttcctgtttttttttttttttttttttttttttagttttcctttttaatgagctcaccctttaacacaaaaaaagcagggtgatgtattttaaaaaaggaagtggaaataaaaaaatctcaaagctatttgagttctcgtctgtccctagcagtctttcttcagctcacttggctctctagatccactgtggttggcagtatgaccagaatcatggaacttgctagaactgtggaagcttctactcctgcagtaagcacagatcgcactgcctcaataacttggtattgagcacgtattttgcaaaagctacttttcctagttttcagtattactttcatgttttaaaaatccctttaatttcttgcttgaaaatcccatgaacattaaagagccagaaatattttcctttgttatgtacggatatatatatatatatagtcttccaagatagaagtttactttttcctcttctggttttggaaaatttccagataagacatgtcaccattaattctcaacgactgctctattttgttgtacggtaatagttatcaccttctaaattactatgtaatttactcacttattatgtttattgtcttgtatcctttctctggagtgtaagcacaatgaagacaggaattttgtatatttttaaccaatgcaacatactctcagcacctaaaatagtgccgggaacatagtaagggctcagtaaatacttgttgaataaactcagtctcctacattagcattctaaaaaaaaaaaaaaaaaaaaaaaaaaaaaaaaaaaaaaaaaag

SEQ ID NO: 87 - protein, 509 aa, Homo Sapiens
MERRRLWGSIQSRYISMSVWTSPRRLVELAGQSLLKDEALAIAALELLPRELFPPLFMAAFDGRHSQTLKAMVQAWPFTCLPLGVLMKGQHLHLETFKAVLDGLDVLLAQEVRPRRWKLQVLDLRKNSHQDFWTVWSGNRASLYSFPEPEAAQPMTKKRKVDGLSTEAEQPFIPVEVLVDLFLKEGACDELFSYLIEKVKRKKNVLRLCCKKLKIFAMPMQDIKMILKMVQLDSIEDLEVTCTWKLPTLAKFSPYLGQMINLRRLLLSHIHASSYISPEKEEQYIAQFTSQFLSLQCLQALYVDSLFFLRGRLDQLLRHVMNPLETLSITNCRLSEGDVMHLSQSPSVSQLSVLSLSGVMLTDVSPEPLQALLERASATLQDLVFDECGITDDQLLALLPSLSHCSQLTTLSFYGNSISISALQSLLQHLIGLSNLTHVLYPVPLESYEDIHGTLHLERLAYLHARLRELLCELGRPSMVWLSANPCPHCGDRTFYDPEPILCPCFMPN

SEQ ID NO: 88 - DNA, 2148 bp, Homo Sapiens
gcttcagggtacagctcccccgcagccagaagccgggcctgcagcccctcagcaccgctccgggacaccccacccgcttcccaggcgtgacctgtcaacagcaacttcgcggtgtggtgaactctctgaggaaaaaccattttgattattactctcagacgtgcgtggcaacaagtgactgagacctagaaatccaagcgttggaggtcctgaggccagcctaagtcgcttcaaaatggaacgaaggcgtttgtggggttccattcagagccgatacatcagcatgagtgtgtggacaagcccacggagacttgtggagctggcagggcagagcctgctgaaggatgaggccctggccattgccgccctggagttgctgcccagggagctcttcccgccactcttcatggcagcctttgacgggagacacagccagaccctgaaggcaatggtgcaggcctggcccttcacctgcctccctctgggagtgctgatgaagggacaacatcttcacctggagaccttcaaagctgtgcttgatggacttgatgtgctccttgcccaggaggttcgccccaggaggtggaaacttcaagtgctggatttacggaagaactctcatcaggacttctggactgtatggtctggaaacagggccagtctgtactcatttccagagccagaagcagctcagcccatgacaaagaagcgaaaagtagatggtttgagcacagaggcagagcagcccttcattccagtagaggtgctcgtagacctgttcctcaaggaaggtgcctgtgatgaattgttctcctacctcattgagaaagtgaagcgaaagaaaaatgtactacgcctgtgctgtaagaagctgaagatttttgcaatgcccatgcaggatatcaagatgatcctgaaaatggtgcagctggactctattgaagatttggaagtgacttgtacctggaagctacccaccttggcgaaattttctccttacctgggccagatgattaatctgcgtagactcctcctctcccacatccatgcatcttcctacatttccccggagaaggaagagcagtatatcgcccagttcacctctcagttcctcagtctgcagtgcctgcaggctctctatgtggactctttatttttccttagaggccgcctggatcagttgctcaggcacgtgatgaaccccttggaaaccctctcaataactaactgccggctttcggaaggggatgtgatgcatctgtcccagagtcccagcgtcagtcagctaagtgtcctgagtctaagtggggtcatgctgaccgatgtaagtcccgagcccctccaagctctgctggagagagcctctgccaccctccaggacctggtctttgatgagtgtgggatcacggatgatcagctccttgccctcctgccttccctgagccactgctcccagcttacaaccttaagcttctacgggaattccatctccatatctgccttgcagagtctcctgcagcacctcatcgggctgagcaatctgacccacgtgctgtatcctgtccccctggagagttatgaggacatccatggtaccctccacctggagaggcttgcctatctgcatgccaggctcagggagttgctgtgtgagttggggcggcccagcatggtctggcttagtgccaacccctgtcctcactgtggggacagaaccttctatgacccggagcccatcctgtgcccctgtttcatgcctaactagctgggtgcacatatcaaatgcttcattctgcatacttggacactaaagccaggatgtgcatgcatcttgaagcaacaaagcagccacagtttcagacaaatgttcagtgtgagtgaggaaaacatgttcagtgaggaaaaaacattcagacaaatgttcagtgaggaaaaaaaggggaagttggggataggcagatgttgacttgaggagttaatgtgatctttggggagatacatcttatagagttagaaatagaatctgaatttctaaagggagattctggcttgggaagtacatgtaggagttaatccctgtgtagactgttgtaaagaaactgttgaaaataaagagaagcaatgtgaagcaaaaaaaaaaaaaaaaaa

SEQ ID NO: 89 - protein, 426 aa, Homo Sapiens
MANDSGGPGGPSPSERDRQYCELCGKMENLLRCSRCRSSFYCCKEHQRQDWKKHKLVCQGSEGALGHGVGPHQHSGPAPPAAVPPPRAGAREPRKAAARRDNASGDAAKGKVKAKPPADPAAAASPCRAAAGGQGSAVAAEAEPGKEEPPARSSLFQEKANLYPPSNTPGDALSPGGGLRPNGQTKPLPALKLALEYIVPCMNKHGICVVDDFLGKETGQQIGDEVRALHDTGKFTDGQLVSQKSDSSKDIRGDKITWIEGKEPGCETIGLLMSSMDDLIRHCNGKLGSYKINGRTKAMVACYPGNGTGYVRHVDNPNGDGRCVTCIYYLNKDWDAKVSGGILRIFPEGKAQFADIEPKFDRLLFFWSDRRNPHEVQPAYATRYAITVWYFDADERARAKVKYLTGEKGVRVELNKPSDSVGKDVF

SEQ ID NO: 90 - DNA, 5163 bp, Homo Sapiens
ttaggggcagaaaaacatttgtaataattaatggctttgagagacacaaggctttgtttgccccagagtattagttaacccacctagtgctcctaatcatacaatattaaggattgggagggacattcattgcctcactctctatttgtttcaccttctgtaaaattggtagaataatagtacccacttcatagcattgtatgatgattaaattggttaatatttttaaaatgcttagaacacagattgggcacataacagcaagcaccacatgtgtttataagataaattcctttgtgttgccttccgttaaagtttaaataagtaaataaataaataaatacttgcatgacattttgaagtctctctataacatctgagtaagtggcggctgcgacaatgctactggagttccagaatcgtgttggtgacaagattgttcaccagcatatggtgtggtgaaaactcactaatttggaattagttcagattattaagcctgaataggtgaaaatcctgaaatcaaggatctttggaactatttgaaatcagtattttatattttcctgttgtattcattaaagtgttgcaagtgttctatttgatggattaagtatatttaggatatacatgttcaatttgtgattttgtatacttaattggaacaagaaagctaataaaggttttgatatggacatctattcttttaagtaaacttcaatgaaaatatatgagtagagcatatagagatgtaaataatttgtggacacaccacagactgaaatagcaaatttaaaagaaattgttggaagaatcaagtgtttgtggaatgagtcctcctagtaaagttcctgctcttgtgaataattaagcctcatgtataattactatagcaaaaggaagcctaagaagtattagactctacttgtatttaaattacattttacataatttatgtgtatgaaaaatgttttaaatgcttattttcgtaagccatgagatagctcctttatattttaagaatttctgaattaatttgcttggattttattagtgcaaatggcagagctagcaattcctttttctgtgttcccattccatcctattcatccctcttttaggaaactctgaactctggattgtccttgtttacatacctgcctcctgcattggactatgtgtctctgagtgtagtatgactaattcatttgtttgtcaaggactctcaatgcatttgttgaacagcctaattagtaatgtctgcaacaatgacattttactgtatttaataaagctctgggaaagtaggatacacataagacaggtctaggtctaaattctttacagaaacttggatttttagttcggtttgaaatttgaagatgtgagtatatttatctcagtttcccaaaggacaagctaattggaattatcatcctctttcacttgattggatccccagaatgccatttacgcatgcagcaggattttataacagttttaaattctgtatatttgatgaagaggttttatatttttggattcaagcctctttttaaacttctacaatatggtttacaataattccttatatcctgcttttgaaatacatattacaactttttaagtttggaaggctatatttcaaggactgaagttacagtatactcaagtgatacacaagcctagcaccccactttccacatagtgttcgataaagattgataaactcgaaatcacagaccttttaattcttaagacaaatagcagcagaaagaaacatctttggcttatttctggtaaggtttttatgctctgtaaaacaaagaattgtattcatccgcgcagcacagattctattaaaaataaatgtgagagtcgttaatgtagtactgctcatttaccatcaaaattcacttttcaggaataatcccatcagtttaaattggatattggaatgagcattgattacatttaacttggtagcccaaaatttcttcatggggttttgaactcggcgggatttcaaaggttttaaaaatgagtttttgattttttttaaaaccctcaaatttcattacctttaaactaggtcgaaacggggcgcaagagattggattaacaccatagtaatacttattttgttcttaaccatttcagggcttcttgaaatagaggctgtatggtgtaatggaaaaaacagccttggaatctgggagcctgattcctggattcagtcccagttttgcgtgaccttgggcaagttactttacttctctgaatttccgtttcctcctctgcaaaatgaggatcgcaatagccaccttgcaaccttgactggagcgagcctcgcacaccccgcgccggcctggaggaagagcagccatgattacgccgccttcgctccgctacccgcttgcggctggcgccctcctccagcaggtgtaggcgctgccgcgctgccccacgcctttccgccgctcgcgggcctgcgcctcggcgtccccgaggaggccgctgcgggctgaggtagcgcaccggcctctcggcgtcccagtccggtcccgggcggagggaaagcgggcgacccacctccgaggcagaagccgaggcccggccccgccgagtgcggaggagcgcaggcagcccccgcccctcggccctccccccggccctcccggccctccctccgccccctccgccctcgcgcgccgcccgcccgggtcgccgcggggccgtggtgtacgtgcagagcgcgcagagcgagtggcgcccgtatgccctgcgctcctccacagcctgggccgggccgcccgggacgctgaggcggcggcggcggccgagggggccggtcttgcgctccccaggcccgcgcgcctgagcccaggttgccattcgccgcacaggccctattctctcagccctcggcggcgatgaggcgctgaggcggctgccggcgctgcgccggagcttaggactcggaagcggccgggccgagggcgtggggtgccggcctccctgaggcgagggtagcgggtgcatggcgcagtaacggcccctatctctctccccgctccccagcctcgggcgaggccgtccggccgctacccctcctgctcggccgccgcagtcgccgtcgccgccgccgccgccgccatggccaatgacagcggcgggcccggcgggccgagcccgagcgagcgagaccggcagtactgcgagctgtgcgggaagatggagaacctgctgcgctgcagccgctgccgcagctccttctactgctgcaaggagcaccagcgtcaggactggaagaagcacaagctcgtgtgccagggcagcgagggcgccctcggccacggagtgggcccacaccagcattccggccccgcgccgccggctgcagtgccgccgcccagggccggggcccgggagcccaggaaggcagcggcgcgccgggacaacgcctccggggacgcggccaagggaaaagtaaaggccaagcccccggccgacccagcggcggccgcgtcgccgtgtcgtgcggccgccggcggccagggctcggcggtggctgccgaagccgagcccggcaaggaggagccgccggcccgctcatcgctgttccaggagaaggcgaacctgtaccccccaagcaacacgcccggggatgcgctgagccccggcggcggcctgcggcccaacgggcagacgaagcccctgccggcgctgaagctggcgctcgagtacatcgtgccgtgcatgaacaagcacggcatctgtgtggtggacgacttcctcggcaaggagaccggacagcagatcggcgacgaggtgcgcgccctgcacgacaccgggaagttcacggacgggcagctggtcagccagaagagtgactcgtccaaggacatccgaggcgataagatcacctggatcgagggcaaggagcccggctgcgaaaccattgggctgctcatgagcagcatggacgacctgatacgccactgtaacgggaagctgggcagctacaaaatcaatggccggacgaaagccatggttgcttgttatccgggcaatggaacgggttatgtacgtcatgttgataatccaaatggagatggaagatgtgtgacatgtatatattatcttaataaagactgggatgccaaggtaagtggaggtatacttcgaatttttccagaaggcaaagcccagtttgctgacattgaacccaaatttgatagactgctgtttttctggtctgaccgtcgcaaccctcatgaagtacaaccagcatatgctacaaggtacgcaataactgtttggtattttgatgcagatgagagagcacgagctaaagtaaaatatctaacaggtgaaaaaggtgtgagggttgaactcaataaaccttcagattcggtcggtaaagacgtcttctagagcctttgatccagcaataccccacttcacctacaatattgttaactatttgttaacttgtgaatacgaataaatgggataaagaaaaatagacaaccagttcgcattttaataaggaaacagaaacaactttttgtgttgcatcaaacagaagattttgactgctgtgactttgtactgcatgatcaacttcaaatctgtgattgcttacaggaggaagataagctactaattgaaaatggtttttacatctggatatgaaataagtgccctgtgtagaatttttttcattcttatattttgccagatctgttatctagctgagttcatttcatctctcccttttttatatcaagtttgaatttgggataatttttctatattaggtacaatttatctaaactgaattgagaaaaaattacagtattattcctcaaaataacatcaatctatttttgtaaacctgttcatactattaaattttgccctaaaagacctcttaataatgattgttgccagtgactgatgattaattttattttacttaaaataagaaaaggagcactttaattacaactgaaaaatcagattgttttgcagtccttccttacactaatttgaactcttaaagattgctgctttttttttgacattgtcaataacgaaacctaattgtaaaacagtcaccatttactaccaataacttttagttaatgttttacaagg

SEQ ID NO: 91 - protein, 837 aa, Homo Sapiens [sequence omitted]

SEQ ID NO: 92 - DNA, 3766 bp, Homo Sapiens
gctctgcccaagccgaggctgcggggccggcgccggcgggaggactgcggtgccccgcggaggggctgagtttgccagggcccacttgaccctgtttcccacctcccgccccccaggtccggaggcgggggcccccggggcgactcgggggcggaccgcggggcggagctgccgcccgtgagtccggccgagccacctgagcccgagccgcgggacaccgtcgctcctgctctccgaatgctgcgcaccgcgatgggcctgaggagctggctcgccgccccatggggcgcgctgccgcctcggccaccgctgctgctgctcctgctgctgctgctcctgctgcagccgccgcctccgacctgggcgctcagcccccggatcagcctgcctctgggctctgaagagcggccattcctcagattcgaagctgaacacatctccaactacacagcccttctgctgagcagggatggcaggaccctgtacgtgggtgctcgagaggccctctttgcactcagtagcaacctcagcttcctgccaggcggggagtaccaggagctgctttggggtgcagacgcagagaagaaacagcagtgcagcttcaagggcaaggacccacagcgcgactgtcaaaactacatcaagatcctcctgccgctcagcggcagtcacctgttcacctgtggcacagcagccttcagccccatgtgtacctacatcaacatggagaacttcaccctggcaagggacgagaaggggaatgtcctcctggaagatggcaagggccgttgtcccttcgacccgaatttcaagtccactgccctggtggttgatggcgagctctacactggaacagtcagcagcttccaagggaatgacccggccatctcgcggagccaaagccttcgccccaccaagaccgagagctccctcaactggctgcaagacccagcttttgtggcctcagcctacattcctgagagcctgggcagcttgcaaggcgatgatgacaagatctactttttcttcagcgagactggccaggaatttgagttctttgagaacaccattgtgtcccgcattgcccgcatctgcaagggcgatgagggtggagagcgggtgctacagcagcgctggacctccttcctcaaggcccagctgctgtgctcacggcccgacgatggcttccccttcaacgtgctgcaggatgtcttcacgctgagccccagcccccaggactggcgtgacacccttttctatggggtcttcacttcccagtggcacaggggaactacagaaggctctgccgtctgtgtcttcacaatgaaggatgtgcagagagtcttcagcggcctctacaaggaggtgaaccgtgagacacagcagtggtacaccgtgacccacccggtgcccacaccccggcctggagcgtgcatcaccaacagtgcccgggaaaggaagatcaactcatccctgcagctcccagaccgcgtgctgaacttcctcaaggaccacttcctgatggacgggcaggtccgaagccgcatgctgctgctgcagccccaggctcgctaccagcgcgtggctgtacaccgcgtccctggcctgcaccacacctacgatgtcctcttcctgggcactggtgacggccggctccacaaggcagtgagcgtgggcccccgggtgcacatcattgaggagctgcagatcttctcatcgggacagcccgtgcagaatctgctcctggacacccacagggggctgctgtatgcggcctcacactcgggcgtagtccaggtgcccatggccaactgcagcctgtacaggagctgtggggactgcctcctcgcccgggacccctactgtgcttggagcggctccagctgcaagcacgtcagcctctaccagcctcagctggccaccaggccgtggatccaggacatcgagggagccagcgccaaggacctttgcagcgcgtcttcggttgtgtccccgtcttttgtaccaacaggggagaagccatgtgagcaagtccagttccagcccaacacagtgaacactttggcctgcccgctcctctccaacctggcgacccgactctggctacgcaacggggcccccgtcaatgcctcggcctcctgccacgtgctacccactggggacctgctgctggtgggcacccaacagctgggggagttccagtgctggtcactagaggagggcttccagcagctggtagccagctactgcccagaggtggtggaggacggggtggcagaccaaacagatgagggtggcagtgtacccgtcattatcagcacatcgcgtgtgagtgcaccagctggtggcaaggccagctggggtgcagacaggtcctactggaaggagttcctggtgatgtgcacgctctttgtgctggccgtgctgctcccagttttattcttgctctaccggcaccggaacagcatgaaagtcttcctgaagcagggggaatgtgccagcgtgcaccccaagacctgccctgtggtgctgccccctgagacccgcccactcaacggcctagggccccctagcaccccgctcgatcaccgagggtaccagtccctgtcagacagccccccggggtcccgagtcttcactgagtcagagaagaggccactcagcatccaagacagcttcgtggaggtatccccagtgtgcccccggccccgggtccgccttggctcggagatccgtgactctgtggtgtgagagctgacttccagaggacgctgccctggcttcaggggctgtgaatgctcggagagggtcaactggacctcccctccgctctgctcttcgtggaacacgaccgtggtgcccggcccttgggagccttggggccagctggcctgctgctctccagtcaagtagcgaagctcctaccacccagacacccaaacagccgtggccccagaggtcctggccaaatatgggggcctgcctaggttggtggaacagtgctccttatgtaaactgagccctttgtttaaaaaacaattccaaatgtgaaactagaatgagagggaagagatagcatggcatgcagcacacacggctgctccagttcatggcctcccaggggtgctggggatgcatccaaagtggttgtctgagacagagttggaaaccctcaccaactggcctcttcaccttccacattatcccgctgccaccggctgccctgtctcactgcagattcaggaccagcttgggctgcgtgcgttctgccttgccagtcagccgaggatgtagttgttgctgccgtcgtcccaccacctcagggaccagagggctaggttggcactgcggccctcaccaggtcctgggctcggacccaactcctggacctttccagcctgtatcaggctgtggccacacgagaggacagcgcgagctcaggagagatttcgtgacaatgtacgcctttccctcagaattcagggaagagactgtcgcctgccttcctccgttgttgcgtgagaacccgtgtgccccttcccaccatatccaccctcgctccatctttgaactcaaacacgaggaactaactgcaccctggtcctctccccagtccccagttcaccctccatccctcaccttcctccactctaagggatatcaacactgcccagcacaggggccctgaatttatgtggtttttatacattttttaataagatgcactttatgtcattttttaataaagtctgaagaattactgttt

SEQ ID NO: 93 - protein, 320 aa, Homo Sapiens
MVGYDPKPDGRNNTKFQVAVAGSVSGLVTRALISPFDVIKIRFQLQHERLSRSDPSAKYHGILQASRQILQEEGPTAFWKGHVPAQILSIGYGAVQFLSFEMLTELVHRGSVYDAREFSVHFVCGGLAACMATLTVHPVDVLRTRFAAQGEPKVYNTLRHAVGTMYRSEGPQVFYKGLAPTLIAIFPYAGLQFSCYSSLKHLYKWAIPAEGKKNENLQNLLCGSGAGVISKTLTYPLDLFKKRLQVGGFEHARAAFGQVRRYKGLMDCAKQVLQKEGALGFFKGLSPSLLKAALSTGFMFFSYEFFCNVFHCMNRTASQR

SEQ ID NO: 94 - DNA, 963 bp, Homo Sapiens
atggttggctatgaccccaaaccagatggcaggaataacaccaagttccaggtggcagtggctgggtctgtgtctggacttgttactcgggcgctgatcagtcccttcgacgtcatcaagatccgtttccagcttcagcatgagcgcctgtctcgcagtgaccccagcgcaaagtaccatggcatcctccaggcctctaggcagattctgcaggaggagggtccgacagctttctggaaaggacacgtcccagctcagattctctccataggctatggagctgtccaattcttgtcatttgaaatgctgacggagctggtccacagaggcagcgtgtacgacgcccgggaattctcagtgcactttgtatgtggtggcctggctgcctgtatggccaccctcactgtgcaccccgtggatgttctgcgcacccgctttgcagctcagggtgagcccaaggtctataatacgctgcgccacgccgtggggaccatgtataggagcgaaggcccccaggttttctacaaaggcttggctcccaccttgatcgccatcttcccctacgccgggctgcagttctcttgctacagctccttgaagcacctgtacaagtgggccataccagccgaaggaaagaaaaatgagaacctccaaaacctgctttgtggcagtggagctggtgtcatcagcaagaccctgacatatccgctggacctcttcaagaagcggctacaggttggagggtttgagcatgccagagctgcctttggccaggtacggagatacaagggcctcatggactgtgccaagcaggtgctacaaaaggaaggcgccctgggcttcttcaagggcctgtcccccagcttgctgaaggctgccctctccacaggcttcatgttcttctcgtatgaattcttctgtaatgtcttccactgcatgaacaggacagccagccagcgctga

SEQ ID NO: 95 - protein, 452 aa, Homo Sapiens
MELALRRSPVPRWLLLLPLLLGLNAGAVIDWPTEEGKEVWDYVTVRKDAYMFWWLYYATNSCKNFSELPLVMWLQGGPGGSSTGFGNFEEIGPLDSDLKPRKTTWLQAASLLFVDNPVGTGFSYVNGSGAYAKDLAMVASDMMVLLKTFFSCHKEFQTVPFYIFSESYGGKMAAGIGLELYKAIQRGTIKCNFAGVALGDSWISPVDSVLSWGPYLYSMSLLEDKGLAEVSKVAEQVLNAVNKGLYREATELWGKAEMIIEQNTDGVNFYNILTKSTPTSTMESSLEFTQSHLVCLCQRHVRHLQRDALSQLMNGPIRKKLKIIPEDQSWGGQATNVFVNMEEDFMKPVISIVDELLEAGINVTVYNGQLDLIVDTMGQEAWVRKLKWPELPKFSQLKWKALYSDPKSLETSAFVKSYKNLAFYWILKAGHMVPSDQGDMALKMMRLVTQQE

SEQ ID NO: 96 - DNA, 1921 bp, Homo Sapiens
cctgttgctgatgctgccgtgcggtacttgtcatggagctggcactgcggcgctctcccgtcccgcggtggttgctgctgctgccgctgctgctgggcctgaacgcaggagctgtcattgactggcccacagaggagggcaaggaagtatgggattatgtgacggtccgcaaggatgcctacatgttctggtggctctattatgccaccaactcctgcaagaacttctcagaactgcccctggtcatgtggcttcagggcggtccaggcggttctagcactggatttggaaactttgaggaaattgggccccttgacagtgatctcaaaccacggaaaaccacctggctccaggctgccagtctcctatttgtggataatcccgtgggcactgggttcagttatgtgaatggtagtggtgcctatgccaaggacctggctatggtggcttcagacatgatggttctcctgaagaccttcttcagttgccacaaagaattccagacagttccattctacattttctcagagtcctatggaggaaaaatggcagctggcattggtctagagctttataaggccattcagcgagggaccatcaagtgcaactttgcgggggttgccttgggtgattcctggatctcccccgtggattcggtgctctcctggggaccttacctgtacagcatgtctcttctcgaagacaaaggtctggcagaggtgtctaaggttgcagagcaagtactgaatgccgtaaataaggggctctacagagaggccacagagctgtgggggaaagcagaaatgatcattgaacagaacacagatggggtgaacttctataacatcttaactaaaagcactcccacgtctacaatggagtcgagtctagaattcacacagagccacctagtttgtctttgtcagcgccacgtgagacacctacaacgagatgccttaagccagctcatgaatggccccatcagaaagaagctcaaaattattcctgaggatcaatcctggggaggccaggctaccaacgtctttgtgaacatggaggaggacttcatgaagccagtcattagcattgtggacgagttgctggaggcagggatcaacgtgacggtgtataatggacagctggatctcatcgtagataccatgggtcaggaggcctgggtgcggaaactgaagtggccagaactgcctaaattcagtcagctgaagtggaaggccctgtacagtgaccctaaatctttggaaacatctgcttttgtcaagtcctacaagaaccttgctttctactggattctgaaagctggtcatatggttccttctgaccaaggggacatggctctgaagatgatgagactggtgactcagcaagaataggatggatggggctggagatgagctggtttggccttggggcacagagctgagctgaggccgctgaagctgtaggaagcgccattcttccctgtatctaactggggctgtgatcaagaaggttctgaccagcttctgcagaggataaaatcattgtctctggaggcaatttggaaattatttctgcttcttaaaaaaacctaagattttttaaaaaattgatttgttttgatcaaaataaaggatgataatagatattattttttcttatgacagaagcaaatgatgtgatttatagaaaaactgggaaatacaggtacccaaagagtaaatcaacatctgtatacccccttcccaggggtaagcactgttaccaatttagcatatgtccttgcagaatttttttttctatatatacatatatattttttaccaaaatgaatcattactctatgttgttttactatttgtttgacatatcagtatatctgaaacaccttttcatgtcaataaatgttcttctctaacattaa

SEQ ID NO: 97 - skipped

SEQ ID NO: 98 - DNA, 1754 bp, Homo Sapiens
aatagttcattaattagtctttattatgtgaaaagacttttctaaaattcttccataataattgaagatataaattacaataattaaaatttacaaaagaataaaagcattaaaataaagtgtgaaaaatttaaaaagggtaaagatgaaaattatttaatttttaatctcaaaaatccgaaagtgattttatcaatgtcctaagaaaattaaaatgaaaacaaacttaataatgtaaagaaaggaggtttctgccgggctgggggcgggagctacggcttctctggggacgcggaagcgagaagcagggaccttggggcgcgcccggttttccgggacggtgccccggcccccagcccacgcctccggccgctggcatggtgctgcttgctgggacccggccgcagggtggctgggagcgctgcatgaccccgccaccgccgtccccactcctaggcgcacaggtcgaggaggaccgcgctgactacaaagagttccagggccccacacctgcagcatagcctgggacgactctgtaccctttccaggacgaggaggagcacggcgtcgagggcttggagagcgtcccggaggagggcgtccaggaggcatggggctgctgcggacgctggtgcggcgaggggtgagcgttgagaaggcgcaggagactgaccacaatggctggaccagccttaatgtcgcctgctaccacggctttgtggatataccgtggtggccttagctgagtaaccccacactgacgtcaactggcaggacagggaggggaacgcagccctaaatacagctgcacaggcaggagctgcctctggccccatgggcaccgttgccttggacactggctctcagccttgtgcttcctggtcagcatcacgtgggctggttcatttgagctttaacacagatctggtggaaacacaggctgccaggccctgcccctggagtctttctttgaataggcctggggtggggcccaagaatgagcagaagaacaggtttcctggtgaggctgatgccgctggcccagggttctcacgttgaggaccgagagctttgaggttttcatacctgatgatgtccaggaacccttctcagtaggcactgaagaccatcagcagaatcacagaccccaggagagatgtcgtcagacagacacagaggcatcaccgaattaaagtgaaaatgaagaaaggagctgagcatctgtttcatgactttcgtggctgttttactaaagaggctatcctggcccagtcagggcacgctatcatcaccaactacttgttgaactacgttcagggtcttgaccttgaaggagggacgcgttcgggttgaaagccgccatgcagggtcgaacggatcgcatcggagccctgagctagcaggggcgggtgtccacgcgagggcccccgccgtgggatgtcgccagaggagtggccacttatacgtccgcctcatgcagaggctcctggagcgcccctgccgggagctgttggggaaaaagtaccagcttgagctgccgccgctccccgagaggccgcaaaagcccgagggctccaagaactgcctgcagaggctcagggactgcgagctgtccgcgctgacgccgcgctccatgcggggcccagaggaccggggcgccctggaccacatggtcaggatgaccacgagcctctaacagccccgccggggccctcgcgtgccagactatgtgccccgagagcaccttgtgctgg

SEQ ID NO: 99 - protein, 359 aa, Homo Sapiens
MAPMGIRLSPLGVAVFCLLGLGVLYHLYSGFLAGRFSLFGLGGEPGGGAAGPAAAADGGTVDLREMLAVSVLAAVRGGDEVRRVRESNVLHEKSKGKTREGAEDKMTSGDVLSNRKMFYLLKTAFPSVQINTEEHVDAADQEVILWDHKIPEDILKEVTTPKEVPAESVTVWIDPLDATQEYTEDLRKYVTTMVCVAVNGKPMLGVIHKPFSEYTAWAMVDGGSNVKARSSYNEKTPRIVVSRSHSGMVKQVALQTFGNQTTIIPAGGAGYKVLALLDVPDKSQEKADLYIHVTYIKKWDICAGNAILKALGGHMTTLSGEEISYTGSDGIEGGLLASIRMNHQALVRKLPDLEKTGHK

SEQ ID NO: 100 - DNA, 1668 bp, Homo Sapiens
cacctcgcggccgtaggctaacgtggaagtcggaccagccggccggcggaagaacctagagcgcgctgcctggcgagtcaggcgcgcggggcggcgttggtggtcttcgcggcgtaactcggcctttcctgggagggagtgatggggcgcaccggggccggggagcgggcgccagtgtagcccgcgcggcgcctggcccggagcgcggcggctgcggcggcggcggcggcgggcgctggaggcctgtgagagccgcagcccggagcgcccggcttcccacgccatggcccccatgggcatccgcctttccccactgggggtggcagtgttttgtctgctggggctcggcgtgctctaccacctctactcgggcttcttggccggccgcttcagcctcttcggcctgggcggcgagcctggcggcggcgcggcggggcccgcggccgcggccgatgggggcaccgtggacttgcgcgagatgctggctgtgtcagtgctggccgcagtccgcggcggcgacgaggtgaggcgcgtccgcgagagcaacgtcctccacgagaagtccaaggggaagacgcgcgagggagccgaggacaagatgaccagcggcgacgtgctgtccaaccgcaagatgttctacctgctcaagaccgccttccccagcgtccagattaatactgaggaacacgtggatgcagctgatcaggaggttatcttgtgggatcataagattcctgaggatatcctaaaggaagtaactactcctaaagaggtaccagcagaaagtgttactgtctggattgacccacttgatgctacacaggaatatacagaggatcttcgaaagtacgtcactactatggtgtgtgtggctgtaaatggtaaacccatgctaggagttatacataagccattttccgaatatacagcttgggcaatggtagatggtggttcaaatgtgaaagcccgctcttcctacaatgagaagaccccaaggatcgttgtgtctcgttcccattcagggatggtcaaacaggtcgctcttcagacttttggaaaccagactacaattatcccagctggtggtgctggttataaagttttagcacttttggatgtgcctgataagagtcaagaaaaagctgatttatacatccatgtgacatacatcaaaaagtgggatatatgtgctggtaatgccatcttaaaagccctaggggggcatatgactaccctgagtggtgaagaaatcagttacactggttcagacggcattgaagggggactccttgctagcatcagaatgaaccaccaggccctggtcagaaaactcccagatctagaaaagacaggacataaatgagcataactgattacagggtacagttcttcacagctgaaatggttagcctgagatgctggaagcttcaaaggattggtggagactatgcatggttaaggccatcccgaactttttaaagtatttatgaagcatcagagacttattttccctgtaatagaatgcaaaatcagggaaaatgggttgctttgtgtctcaagtattgtctttatttttgagactattttcatacagttgtcatacacaaggcgcatatatatatttgtgaattaaaatctgtagctgagtctaaaaaaaaaaaaaaaaaa

SEQ ID NO: 101 - skipped

SEQ ID NO: 102 - DNA, 596 bp, Homo Sapiens
tttttttttatttggattctatttatttaaaattaaattctttgcaaaattgaacttctcaactaaaacgtgtccatgtcagaattttaactgttagcaggtagtttgtggcaaagatggctaaataatgaagcaaattagaatctgtgtgtatactaatgagctgctttttttctgttgagactatcattatttgtcttattacccaagaggcaattacctgaatttggatgtctgaattataacttatgcaggaatagttctgtaaatacatttaaataaactgtaaagatatttaataaatatagtatttatactaatctgtgtgcttcttttggtttgaatagtaactaaatgagacaccagcccttgacattgagtttgttggtcactatcaggtcctcatttccaagcctcctagtcattctagcactgattatatgctgctactttaactggctccagctgcttcactacatcagtttagcttcctcagaaattcatcaaaatggacggacaattaaatgtaaattatagaactttttcccagctgaggctttgcaccttccgtatagtatagagggaagctacaaaaa

SEQ ID NO: 103 - protein, 128 aa, Homo Sapiens
MPIVDFHLQKLPAAAAAPFLDKSHSSSPGSPKTAELFFTERTPWFHQFPQIPVAPDLSSRGTRRKDFLSTRRILGAAKVPVVSFYHSRGVLLKASERASGGSKAVQPGRKEKETPRHRKPRFSRRKNR

SEQ ID NO: 104 - DNA, 1963 bp, Homo Sapiens
aatattgcagagcaacttgaaagggggagctggccgcgtaggaggtgagagccagccgcaaaaatccgttcggcggcattttctcttcaaacccgcccggtcggatgtggcatttgaagaaagaaggcgtgggtcaataatcaacccgcactttctcctccaaactgctgacgcgactctcaccgccttctcagctaagccagctgccgggaaggccagctctccgtaagaacctgccaggggaagggattctctgggccaaggggaccgagggctcccgagcaagggctggggcgccctgaaagcatacctttccactggcgccaagaccctgccgggcaaaacgcggggaccagacctgaggagccgtgggagcccagggagatctggggcgggagcttcgttccggccagggcctctatccgccccgatacgtggctcctgggccgcgggcctcagcgggcagaagtggggctccgacctcaagatgaaggtccagcgtcctggcatgcagatggtcggtgccccagcctcaagccgctctgcttaaatccaaaggactggctttggagcaagcgtaggcgagattattttaaaataataatttatgctggcggaaggtttttatttgttggtttgctattggtgttttgttttttaagcgaaaatgccgattgttgatttccacctccagaaattaccagccgccgccgctgcgccctttctagacaaatcccacagcagttcacccggctcccccaaaaccgcagagcttttctttactgagaggaccccttggttccaccaattcccccaaatccccgtggctcccgatctctcatccagggggactagaagaaaagattttctcagcactagaagaatacttggagcagcaaaggtgcccgtggtgtctttctaccattcaaggggtgtcctcctgaaggcgtctgagagggcctctggcggttccaaggctgtgcagccggggaggaaggaaaaggaaacgccaagacatagaaaaccacgcttttcccgtaggaagaaccgatgatgagccctgatgaaagaaggaagaagacccgctgtctgcgaaggcctaaaggttagaaatacagcaatttttctcatgccgaaggaaaggcaaaatggtctaagaaactgcaagagtgtgatacaagttttcctcaacagcgagctgggactggcgacaatttcttaactcacagcctccgcagtcgccttagtcgacaaagagagcagcccacgtagcggccgccgcgcccgtgcccgtggcctttacttgcttttgccctgaagttcagtgtagtggtttgtttggggcttgcaggaagaaacaaacacactccctctgactctccacaacccatctttgccttctgcaaccgcttctcctgcccatcgctggttttggggtaggctctttgtctgcctgaggccccgcactcgcagggcaagaagcttaaaggaatccaactccaaactcctccgaagttaaatattgaccagaacctctttcaacaggccgcggttgccaggaaccgtggagggccaactcctcccaaccgccctggtgcaaagtcccacgcggcgaagagttttggagcagcgcttacctagaaagatgtttaaattctgaaccaggaattgtctccaactccaggcgctcagggaatcgccttttccggtgtccaggcgctctgcagacaaataaacagcagaaggtgaatggcggctgcgagggaagggagttggaggccgggagtgggaagcgaggctcatgcgggcgccaaggtggccctgggggtgacgcgaacatcagggagtcaccagggcactcgtccgtgtggcgcactcattgctcgaaatgttccagtctacaaatggtccgaagatggtgatttatttttgtaaaataaatacatactccatctccacaccc

SEQ ID NO: 105 - skipped

SEQ ID NO: 106 - DNA, 423 bp, Homo Sapiens
  misc_feature 356, 397, 422: n = A,T,C or G
ttttttttcctagtttcattaaagatggagttcatatttgtttctcatattaatttttaagacaaaaaaaagcagaactgttttcacccattaagttaaaaactggaattttacctttccaaacttatttcctaccttgccccttttcatgttaataccatgaactattcagtaattctcttcaagctccataatttcctactttctacttttgctcattatttccattccaagggaaagttctgtgtgcgtgtctatttctatgttcaaattacacctgtaagatccaactcacagggccattgccctctaggggtctctcctggatccacttcaacaggaggtaattttatctncaccggataccatttcctccttggacacttacctcttttanggggactcccgagggttgagggggng

SEQ ID NO: 107 - skipped

SEQ ID NO: 108 - DNA, 621 bp, Homo Sapiens
gcttacctggaaaactgtaacaatctccaggttgacctttctgtctccctctaaacacatcacattggctaaaattatcttttgttaataaggattatattacatataaaagtatttaaatattttaatgactcttacccttaggatagggtctgaactccttagcaggcttcatgatatattaaccttgttgacctctttggtctctctcagtacttctcaattcatactttgctcttcagccacagtaagttagttttagttccctgagtatgttatcagctctctggattctgggctttgctcatatttcctctattcaaaatactcttatacttcatgtctttcttgccacaccccccaccccttcccaccagcatatgtgtatgtatcacaattactcatccttcagatcagattcagtttaaatggcatttctttgggaagcatttcctgattctctacctcccaggctgggttgattgcatgtatagcaccttctactgtagtacccttttcatggcatttacttaccatagcctatttgttattgccctcaagctccattagggcaaattgttttttcattgttttaaagtcagcacctaaatctccctggcc

SEQ ID NO: 109 - skipped

SEQ ID NO: 110 - DNA, 383 bp, Homo Sapiens
  misc_feature 12, 13, 317, 330, 366: n = A,T,C or G
tctctacaaatnnctataacaaaactttttaggaaagtaccacaaatatgttaaacagaagaagcaaatctcaaataatgtgcaaaagctgtgagtttcttcttacataaaactggtacctaagcaagtgagggttcattttatttttcactcaccaatccccatatcattatacagtaacaccatacagccaaaacggccatgatattcctcccttctcagccaaaattgggcaagagagaatgacccttgtaggggaaaagaaacctctacgataaactgaaatgccaccatcagggtttgttgaaactgtaggnacagggtctacgnctcacttagctgctaatgagtttctatggttccagntggggtagttcaaagta

SEQ ID NO: 111 - skipped

SEQ ID NO: 112 - DNA, 3488 bp, Homo Sapiens
taaaaagcattaggcatataaatgtataaatatattttatcatgtacagtacaaaaatggaaccttatgcatgggccttaggaatacaggctagtatttcagcacagacttccctgcttgagttcttgctgatgcttgcaccgtgacagtgggcaccaacacagacgtgccacccaaccccctgcacacaccaccggccaccaggggcccccttgtgcgccttggctttataactcctctgggggtgatattggtggtgatcacagctcctagcataatgagagttccatttggtattgtcacacgtctcctgcctcgcttgggttgccatgtttgagcgatggccctgttgatttcaccctgccttttactgaatctgtaaattgttgtgcaattgtggttatagtagactgtagcacattgccttttctaaactgctacatgtttataatcttcatttttaaagtatgtgtaatttttttaagtatgtattctattcatatggtctgcttgtcagtgagccagacttgcttactatattcctttataataatgctagccacttcctggattctttagtaatgtgctgcatgcaagaactttccagtagcagtgaaggagggctgcctctccaagcttcctaagggatgctgccctgtgtggggatgcattgcagaggcactagtagcatgggggctagagtggggagcgagatgtaaaagggtggggggataggagaattccagagtgcttccagcattagggtcctgagaacttctgagttcagagaaacatgcaaagtgactaacaaaatagctacttacctttgcagttctacagaccctgggagctgctttgggagtgagaaaggcaaccctccaatgtgtttcaactttaaaatgttgaattcttttcagacatggtatctcatttattctccttttctagcgtttgttgaatttcaggcagaatgtcttacagactgtcctagaaccagattatcatttaatctgaaacagctgaggaagggacagagaaggtacaagggcaaggcagcacaaaacagatcaggagaatgaagagggaatgctttggttttttgttttgttttgttttttctttttcaagtaactaaaacaacatctacatgtagagtgttgtggagagctgagaccagggtaaagtcaagtgcagcatcagtactgcgagacccaccagcccctggagagggtcagccgagaatctggtagtgaagcctgtctagggtcccggcaccctcaccctcagccacctgcagagaggccagggccccagagactagcctggttctgaagtgggcaggggtgctgccagagccctctgccccttatgttgagaccctgctttcaggacaggccagccgttggccaccatgtcacattctgagtgagtgtcacaggtccctaacaataattttctgatctggagcatatcagcagaatgcttagcctcaaggggcctggaagctgtaatgtttgatttatgatgagaactatccgaggccacccttggcctctaaataagctgctctagggagccgcctactttttgatgagaaattagaagagtacctaatgttgaaaacatgacatgcgctcttgggatctgctgttctctccagggctccagaacctgatacctgttaccaaagctaggaaagagctttatcacaagccttcactgtcctggcatgagaactggctgccaggctcagtgtaccccattaactgtgaatgaatctgagcttggtttcctttattgcttcctctgcaatatgattgctgaaacacattttaaaaattcagaagcttgtcactcctgttaatgggaggatcagtcacacatgtgtagtacaaggcggactttgtgtttgtttttggtgttaatttttagcattgtgtgtgttgcttccccaccctgaggagaggacaccatggcttactactcaggacaagtatgccccgctcagggtgtgatttcaggtggcttccaaacttgtacgcagtttaaagatggtggggacagactttgcctctacctagtgaaccccacttaaagaataaggagcatttgaatctcttggaaaaggccatgaagaataaagcagtcaaaaagaagtcctccatgttggtgccaaggacttgcgaggggaaataaaaatgttatccagcctgaccaacatggagaaaccccgtctccattaaaaatacaaaattagcctggcatggtggcgcatgcctgtaatcccagctactctggaggctgaggcaggagaatcgcttgaacccaggaggcggaggtcgcagtgagccgagatcatgccagtgcactccagcctgggtaacaagagtgaaactccgtgtcaaaaaaaaaaaaaaaaaatgttactcatcctctctgaaagcaaaaaggaaaccctaacagctctgaactctggttttatttttcttgctgtatttgggtgaacattgtatgattaggcataatgttaaaaaaaaaaaatttttttttggtagaaatgcaatcaccagtaaagaggtacgaaaaagctagcctctctcagagaccggggaggcagagtactactagaggaagtgaagttctgatggaatcatgcctgtcaaatgaggtcttgaagcggatgcccaaataaaagagtatattttatctaaatcttaagtgggtaacattttatgcagtttaaatgaatggaatattttcctcttgtttagttgtatctgtttgtatttttctttgatgaatgattggtcatgaggcctcttgccacactccagaaatacgtgtgcggctgcttttaagaactatgtgtctggtcacttatttctctaaaattatctcattgcctggcaatcagtcttctcttgtatacttgtcctagcacattatgtacatgggaaatgtaaacaaatgtgaaggaggaccagaaaaattagttaatatttaaaaaaatgtattgtgcattttggcttcacatgtttaactttttttaagaaaaaagttgcatgaatggaaaaaaaaatctgtatacagtatctgtaaaaactatcttatctgtttcaattccttgctcatatcccatataatctagaactaaatatggtgtgtggccatatttaaacacctgagagtcaagcagttgagactttgatttgaagcacctcatccttctttcaatgcgaacactatcatatggcattcttactgaggattttgtctaaccatatgttgccatgaattaactctgccgcctttcttaaggatcaaaaccagtttgatttgggaatcttcccctttccaaatgaaatagagatgcagtacttaactttccttggtgtttgtagatattgccttgtgtattccacttaaaaccgtaatctagtttgtaaaagagatggtgacgcatgtaaataaagcatcagtgacactct

SEQ ID NO: 113 - protein, 274 aa, Homo Sapiens
MGTDSRAAKALLARARTLHLQTGNLLNWGRLRKKCPSTHSEELHDCIQKTLNEWSSQINPDLVREFPDVLECTVSHAVEKINPDEREEMKVSAKLFIVESNSSSSTRSAVDMACSVLGVAQLDSVIIASPPIEDGVNLSLEHLQPYWEELENLVQSKKIVAIGTSDLDKTQLEQLYQWAQVKPNSNQVNLASCCVMPPDLTAFAKQFDIQLLTHNDPKELLSEASFQEALQESIPDIQAHEWVPLWLLRYSVIVKSRGIIKSKGYILQAKRRGS

SEQ ID NO: 114 - DNA, 1610 bp, Homo Sapiens
ggcacgaggctgcggccgcagtagccggagccggagccgcagccaccggtgccttcctttcccgccgccgcccagccgccgtccggcctccctcgggcccgagcgcagaccaggctccagccgcgcggcgccggcagcctcgcgctccctctcgggtctctctcgggcctcgggcaccgcgtcctgtgggcggccgcctgcctgcccgcccgcccgcagccccttgcctgccggcccctgggcggcccgtgccatgggcaccgacagccgcgcggccaaggcgctcctggcgcgggcccgcaccctgcacctgcagacggggaacctgctgaactggggccgcctgcggaagaagtgcccgtccacgcacagcgaggagcttcatgattgtatccaaaaaaccttgaatgaatggagttcccaaatcaacccagatttggtcagggagtttccagatgtcttggaatgcactgtatctcatgcagtagaaaagataaatcctgatgaaagagaagaaatgaaagtttctgcaaaactgttcattgtagaatcaaactcttcatcatcaactagaagtgcagttgacatggcctgttcagtccttggagttgcacagctggattctgtgatcattgcttcacctcctattgaagatggagttaatctttccttggagcatttacagccttactgggaggaattagaaaacttagttcagagcaaaaagattgttgccataggtacctctgatctagacaaaacacagttggaacagctgtatcagtgggcacaggtaaaaccaaatagtaaccaagttaatcttgcctcctgctgtgtgatgccaccagatttgactgcatttgctaaacaatttgacatacagctgttgactcacaatgatccaaaagaactgctttctgaagcaagtttccaagaagctcttcaggaaagcattcctgacattcaagcgcacgagtgggtgccgctgtggctactgcggtattcggtcattgtgaaaagtagaggaattatcaaatcaaaaggctacattttacaagctaaaagaaggggttcttaactgacttaggagcataacttacctgtaatttccttcaatatgagagaaaattgagatgtgtaaaatctagttactgcctgtaaatggtgtcattgaggcagatattctttcgtcatatttgacagtatgttgtctgtcaagttttaaatacttatcttgcctccatatcaatccattctcatgaacctctgtattgctttccttaaactattgttttctaattgaaattgtctataaagaaaatacttgcaatatatttttcctttatttttatgactaatataaatcaagaaaatttgttgttagatatattttggcctaggtatcagggtaatgtatatacatattttttatttccaaaaaaaattcattaattgcttcttaactcttattataaccaagcaatttaattacaattgttaaaactgaaatactggaagaagatatttttcctgtcattgatgagatatatcagagtaactggagtagctgggatttactagtagtgtaaataaaattcactcttcaatac

SEQ ID NO: 115 - protein, 403 aa, Homo Sapiens [sequence omitted]

SEQ ID NO: 116 - DNA, 3160 bp, Homo Sapiens
cctcccctcgcccggcgcggtcccgtccgcctctcgctcgcctcccgcctcccctcggtcttccgaggcgcccgggctcccggcgcggcggcggagggggcgggcaggccggcgggcggtgatgtggcaggactctttatgcgctgcggcaggatacgcgctcggcgctgggacgcgactgcgctcagttctctcctctcggaagctgcagccatgatggaagtttgagagttgagccgctgtgaggcgaggccgggctcaggcgagggagatgagagacggcggcggccgcggcccggagcccctctcagcgcctgtgagcagccgcgggggcagcgccctcggggagccggccggcctgcggcggcggcagcggcggcgtttctcgcctcctcttcgtcttttctaaccgtgcagcctcttcctcggcttctcctgaaagggaaggtggaagccgtgggctcgggcgggagccggctgaggcgcggcggcggcggcggcggcacctcccgctcctggagcgggggggagaagcggcggcggcggcggccgcggcggctgcagctccagggagggggtctgagtcgcctgtcaccatttccagggctgggaacgccggagagttggtctctccccttctactgcctccaacacggcggcggcggcggcggcacatccagggacccgggccggttttaaacctcccgtccgccgccgccgcaccccccgtggcccgggctccggaggccgccggcggaggcagccgttcggaggattattcgtcttctccccattccgctgccgccgctgccaggcctctggctgctgaggagaagcaggcccagtcgctgcaaccatccagcagccgccgcagcagccattacccggctgcggtccagagccaagcggcggcagagcgaggggcatcagctaccgccaagtccagagccatttccatcctgcagaagaagccccgccaccagcagcttctgccatctctctcctcctttttcttcagccacaggctcccagacatgacagccatcatcaaagagatcgttagcagaaacaaaaggagatatcaagaggatggattcgacttagacttgacctatatttatccaaacattattgctatgggatttcctgcagaaagacttgaaggcgtatacaggaacaatattgatgatgtagtaaggtttttggattcaaagcataaaaaccattacaagatatacaatctttgtgctgaaagacattatgacaccgccaaatttaattgcagagttgcacaatatccttttgaagaccataacccaccacagctagaacttatcaaacccttttgtgaagatcttgaccaatggctaagtgaagatgacaatcatgttgcagcaattcactgtaaagctggaaagggacgaactggtgtaatgatatgtgcatatttattacatcggggcaaatttttaaaggcacaagaggccctagatttctatggggaagtaaggaccagagacaaaaagggagtaactattcccagtcagaggcgctatgtgtattattatagctacctgttaaagaatcatctggattatagaccagtggcactgttgtttcacaagatgatgtttgaaactattccaatgttcagtggcggaacttgcaatcctcagtttgtggtctgccagctaaaggtgaagatatattcctccaattcaggacccacacgacgggaagacaagttcatgtactttgagttccctcagccgttacctgtgtgtggtgatatcaaagtagagttcttccacaaacagaacaagatgctaaaaaaggacaaaatgtttcacttttgggtaaatacattcttcataccaggaccagaggaaacctcagaaaaagtagaaaatggaagtctatgtgatcaagaaatcgatagcatttgcagtatagagcgtgcagataatgacaaggaatatctagtacttactttaacaaaaaatgatcttgacaaagcaaataaagacaaagccaaccgatacttttctccaaattttaaggtgaagctgtacttcacaaaaacagtagaggagccgtcaaatccagaggctagcagttcaacttctgtaacaccagatgttagtgacaatgaacctgatcattatagatattctgacaccactgactctgatccagagaatgaaccttttgatgaagatcagcatacacaaattacaaaagtctgaatttttttttatcaagagggataaaacaccatgaaaataaacttgaataaactgaaaatggacctttttttttttaatggcaataggacattgtgtcagattaccagttataggaacaattctcttttcctgaccaatcttgttttaccctatacatccacagggttttgacacttgttgtccagttgaaaaaaggttgtgtagctgtgtcatgtatatacctttttgtgtcaaaaggacatttaaaattcaattaggattaataaagatggcactttcccgttttattccagttttataaaaagtggagacagactgatgtgtatacgtaggaattttttccttttgtgttctgtcaccaactgaagtggctaaagagctttgtgatatactggttcacatcctacccctttgcacttgtggcaacagataagtttgcagttggctaagagaggtttccgaaaggttttgctaccattctaatgcatgtattcgggttagggcaatggaggggaatgctcagaaaggaaataattttatgctggactctggaccatataccatctccagctatttacacacacctttctttagcatgctacagttattaatctggacattcgaggaattggccgctgtcactgcttgttgtttgcgcatttttttttaaagcatattggtgctagaaaaggcagctaaaggaagtgaatctgtattggggtacaggaatgaaccttctgcaacatcttaagatccacaaatgaagggatataaaaataatgtcataggtaagaaacacagcaacaatgacttaaccatataaatgtggaggctatcaacaaagaatgggcttgaaacattataaaaattgacaatgatttattaaatatgttttctcaattgtaaaaaaaaaa

SEQ ID NO: 117 - skipped

SEQ ID NO: 118 - DNA, 371 bp, Homo Sapiens
  misc_feature 112, 125, 156, 208, 224, 232, 239, 258, 270, 297, 316, 350,359: n = A,T,C or G
ttctatcagaaattgtatttatttaccagcatttatggcaaatggccagacctgggcagggtggtagcaatgatagattttacaaattaaggcattgttctttatttcaaanttttcatttaccnatattttccttggtcttagaaatatgaatantttagagctggcaatactcaccatcaggatataataaacggaggtttctttntccgaaatccataaantgtagtantactctnttgtacttttaaaattccnatttttgcagtnggcttcctctcagtgatttagttaggnagttttggtacattttggnggggtcataaacatgttcataggataggagtacngggcatttntggaaaaacccg

SEQ ID NO: 119 - protein, 228 aa, Homo Sapiens [sequence omitted]

SEQ ID NO: 120 - DNA, 2416 bp, Homo Sapiens
agattatgatcgcctgaggcccctctcctacccagataccgatgttatactgatgtgtttttcctttttttttttttttttttaagtaattaagggtagttaaattatttaaagtatacaaagtccaaacagccaggggtaaggtctccaagaggccttcccagggtaagggagtgcggagaggccccggtcgccacccgcggtgcccatggagcgggtgaagatgatcaacgtgcagcgtctgctggaggctgccgagtttttggagcgccgggagcgagagtgtgaacatggctacgcctcttcattcccgtccatgccgagcccccgactgcagcattcaaagcccccacggaggttgagccgggcacagaaacacagcagcgggacgagcaacaccagcactgccaacagatctacacacaatgagctggaaaagaatcgacgagctcatctgcgcctttgtttagaacgcttaaaagttctgattccactaggaccagactgcacccggcacacaacacttggtttgctcaacaaagccaaagcacacatcaagaaacttgaagaagctgaaagaaaaagccagcaccagctcgagaatttggaacgagaacagagatttttaaagtggcgactggaacagctgcagggtcctcaggagatggaacgaatacgaatggacagcattggatcaactatttcttcagatcgttctgattcagagcgagaggagattgaagtggatgttgaaagcacagagttctcccatggagaagtggacaatataagtaccaccagcatcagtgacattgatgaccacagcagcctgccgagtattgggagtgacgagggttactccagtgccagtgtcaaactttcattcacttcatagaacccagcatgacataacagtgcagggcaaaatattcactgggccaattcaatacaaacaatctcttaaattgggttcatgatgcagtctcctctttaaaacaaaacaaaacaaaacaaaactatacttgaacaaaagggtcagaggacctgtatttaagcaaatacttagcaaaaagtggggcagagctcccaaggagaacaaatattcagaatattcatattggaaaaatcacaatttttaatggcagcagaaaacttgtgtgaaattttcttgatttgagttgattgagaagaggacattggagatgccatcctctttctcttttctcgtttgctcatactacattgagtagacacatttaaggatggggttatgaacccttcctgagctttatggtcctaaaagcaaaataaaaactattcgaatgaaaagacaagaaaatcaggtattaatcttggatagctaataatgagctattaaaactcagcctgggacagtttatcatgaagcctgtggatgatcaatcctttattattattttttttttttgaaaaaagctcatttcatgctctgcaaaaggagagactcccatgaagccttttgaaagggatcatcatgcagctcaactttctgttggattccatgctaagcaagctaaccttatcctgcattgttagcactaggcacccagctgccacctctccatcctgctgcccttaggccacatgggagcagtccatgcatgacagcctctatcctacaaggcctatgagtatggattgggggggccaaaaggaaaaagctccatgtgcctctttgtctgcgtgggtcagaagagttgtgcacgcagattagcaggccaaggtctgagccacagcagcatttttatttcagattttgataactgtttatatgtgttgaaaaccaaaatgacatctttttaaagcttatccataaaaaaaaatagatgtcttttatagtggaaaaacacatggggaaaaaaatcatctattttgatgcagcatttgataatgataaaacacctcacacctcactctttatagtgcacaaaatgaatgaggtctgggctaggtagaaaaagggtcaatgctatttttgtttttagaatcattaccttttaccagcttttaaccatctgatatctatagtagacacactatcatagttaacatagttaagttcagcacttgtctcattttaatgtaaagatttgcttccattttcctacaggcagtctctctcttcctcacagtcccactgtgcaggtgctattgttactcttacgaatattttcagtaatgttattttcttctaagtgaaatttctagcctgcactttgatgtcatgtgttccctttgtctttcaaactccaaggttcccctgtggccctctcccttaccctgggaaggcctcttggagaccttacccctggctgtttggactttgtatactttaaataatttaactacccttaattacttaaaaaaaaaaaaaaaa

SEQ ID NO: 121 - protein, 625 aa, Homo Sapiens [sequence omitted]

SEQ ID NO: 122 - DNA, 3250 bp, Homo Sapiens
ccaacttatttaaaacaaaacaattttgtaggtattattatacccatttcacagatgatgataaatgagaccaatagaagttaaataacttgccaaaggccacacagctggtgagtgatggagaacgaattaaaactcaagtgagcataattctaaaagccatcttctcgttagtgtttctcactatccaggtctgcctttgccttatttaactgaagttaagccatccttacctgtgatcacctagcctctcagtttggggggatcattacagcgggtttttaactcccaatgttctggtccagtttgctttacatgttcttatttatacattgtcaaggatgacctcaggacagtacagcaaggacacagtggcacttcacattttgttcccacgaaatgactggggcataatctcagatcatcttcctttagaatgtggaaacatcagcagaagaatattagtctttatacaagtcaaatccaaaatgacacatgtgaaaactaatagagctgactttcagccatgatagctttggcacacctcacatccctttgttcaacctctcttccctcaacggagagctgcattcctgggaatttctgttgtgcacttttcccacttgccctgctgtcatttaaaggtgaacattctagttttgctaagaaaaccctttccttcatttggaatgaacagcaattttattacttttgaccttaaaatgagtttgctgccttcaaatcttttcagcgccttcatcacgctctgcttcggggcgatcttcttcctgccagactcctccaagctgctcagcggggtcctgttccactccagccccgccttgcagccggccgccgaccacaagcccgggcccggggcgcgcgccgaggacgcggccgaggggcgagcccggcgccgcgaggagggggcacccggggacccggaggccgccctggaggacaacttggccaggatccgcgaaaaccacgagcgggctctcagggaagccaaggagaccctgcagaagctgcccgaggagatccaaagagacatcctactggagaagaagaaggtggcccaggaccagctgcgtgacaaggcgccgttcagaggcctgcccccggtggacttcgtgcccccaatcggggtggagagccgggagcccgccgacgccgccatccgcgagaaaagggcaaagatcaaagagatgatgaaacatgcttggaataattataaaggttatgcctggggattaaatgaactcaaacctatatcaaaaggaggccattcaagcagtttgtttggtaacatcaaaggagcaactatagtagatgccctggatacactttttattatggaaatgaaacatgaatttgaagaagcaaaatcatgggttgaagaaaatttagattttaatgtgaatgctgaaatttctgtctttgaagtaaatatacgctttgttggtggactactctcagcctactatctgtctggagaagagatttttcgaaagaaagcagtggaacttggggtaaaattgctacctgcatttcatactccctctggaataccttgggcattgctgaatatgaaaagtggtattggaaggaactggccctgggcctctggaggcagcagtattctggcagaatttggaaccctgcatttggagtttatgcacttgagccacttatcaggaaaccccatctttgctgaaaaggtaatgaatattcgaacagtactgaacaaactggaaaaaccacaaggcctttatcctaactatctgaatcccagtagtggacagtggggtcaacatcatgtatcagttggaggacttggagacagcttctatgagtatttgctgaaggcctggttaatgtctgacaagacagatctggaagctaagaagatgtattttgatgctgttcaggctatcgagactcatttgatccgcaagtctagcagcggactaacttatatcgcagagtggaaaaggggcctcctggagcacaagatgggccacctgacctgcttcgcggggggcatgttcgcactcggggctgatgcagctcccgaaggcatggcccaacactaccttgaactcggggctgaaattgcccgtacttgtcatgaatcatataatcgaacatttatgaaactgggaccagaagctttcagatttgatggtggtgttgaagccatcgctacaagacaaaatgaaaaatactacatcttacggccagaagttatggagacttacatgtatatgtggagactgactcatgatccaaagtacaggaaatgggcctgggaagccgtagaggccttggaaaaccattgcagagtgaatggaggctattcaggcctaagggatgtttaccttcttcatgagagttatgatgatgtgcagcagagtttcttcctggcagagacattgaaatatttgtacctaatattttctgacgacgatcttcttccactggagcattggatcttcaatagcgaggcacatcttctccctatcctccctaaagataaaaaggaagttgaaatcagagaggaataaaaaagacatttatattttattctgctccattcccttcactgtataccttaataattccttttctggtaatcaggcacatgatgaactttgattagtaggtctgtgattaagttcttaaattgttttgcagtcttttatgtttattatcataggtataggtggacctaaattccttatcatatctttattaattcagccagtgtatccaccagttttttgtttatgtttttaagtaacctattatctctggatttcatgaaggtgtaatatcgtttttgttaaactgaatagaattgtatagcgatgacctcttaattataatttgatttgactgcaaaactttttcctcctctaagaggagatgatgtctgctttaagctgtaatgttttgccatgttgcaaaaagccataataataagtataaaaaagctttttcctttacaatttcatgttaatctggtttgtctgtccaccagagacagatcttctgtgacagcctccttatgcaggtctatcattatttgatagaatgtcttctaaaatacttcactcacattgtaattcaaattagaaagtcattccaaaaggtcatgtcatgttgacctcatttcatcggaactgcagtatatttttgttggttaattatattagtgttttctattttgaaaaaaaaaaaaaaaaaa

SEQ ID NO: 123 - skipped

SEQ ID NO: 124 - DNA, 293 bp, Homo Sapiens
ttttggtctgagaatgatggacatttagacactggcgccaggtttgcgctggaccggcgcacgcaggggttgggcggacgaaagacacacaggtgggctacaggtgtcacacggcaccagccagggcccggggtggctggggtgaggatgggtgtttggccagtgaccaggagtcaggtcaagtccaggtggtcagtgccaggggtcccaggaggggagggcagtgcattaaccctcctggtgtccagcgtcaccaggcggtcgtcacagaaagcaacctcggcccggggccg

SEQ ID NO: 125 - skipped

SEQ ID NO: 126 - DNA, 342 bp, Homo Sapiens
aattatatattacatgtttattaagagcacaacttttatgtaaaatttacatttaatgaaaaaaatcaaaaatatttacaaaatcttggaagacagatgtgcattgttctaattacaatccaaagtagtaaataacaatcctttaaaactcacatttattagagttgtgtttacaaattcttggttaaagaggcagctacaaagtttaccactatatataagcaagaaccagcttgctaggtacatttcccattgaaaatctactggtctcttttacaccattagtggatttttaaatggaaaaaaaaaatcaatataaactcatatggcttcaaaattgta

SEQ ID NO: 127 - skipped

SEQ ID NO: 128 - DNA, 1814 bp, Homo Sapiens
aatatagttatcttcttaaaaaccattataacaattcagagagagttctttacaaagccatgaatatgaactatggggaatcatggttcttttaaagcaattttcaaaataagtaccaattaaagctttaggttccaagaagattctgggactcaggaagaaaaagtgccatcaggtgaccagctgttgcatttcttgcttattctgttttgtttttgcacatcataatggatttttcttagtgccctaattgtgaagggtttctctagctttggttatgtgtaatgttcacgtgacctttttttgtcaatcgtttttggaatttttctttctttctgtgctttattactaataagtccaatgagtgagtagtagctagatgactagtatgtagttttatattttggtaaaattatttgccctttcagaaatgcctcatctaaagatacatgataattttggagttggagggggccttagaggctctccagctctgcttcttgcccattgccaaatactgaaatggaagcccgtcttacctggggtcactaactggttggttaactgagctaagaataggctgtgggtctcctcacttgtggcccagtgctctttctgctatacaaaatgtctaatctcagatttttcttctgctgcttgactgcttcatctggatgaactacaaaaaacccatgattaaggtttatgaattcaagtaataattagattttttttgcacagacttacttaacttccttattggatatgtttgtaacacataaacacaaagcacttttcaaacatgatgcacttttatctttgtgaataatttactgtcctttcctcctgggatatgagaaacattttaaaaaacgtatttaacagaagagagcaaataaagatatatcaggaaggatgtattagttatttacttaaatgtttataatatctggattttttttgttttgttactcatagaactggtgttgtttgctgtttttatttctctaattgttgcagagttctgcctgttacaaagctacagaactgtattgtttttattttccttcttgagcacatgttaacaaactaagcttcacattagagtgatgtcataatgtaaaatgtttgcattgtggttaggtattgaagtttatgtcctgtctgtgtaaagattcatcttttattgtaaatatttagactttaccacagaaatattggaacagtttgctttataagattaaaaagcatccttcagaatggagcttgccttgtgcttagaaataatatgttgaactattttgcaatatactattttaaatctaaattctgtcacttcgctgccttcttaaaatagtgtggtatttcaaatattgctagagctattttcctgaaatacatttgcaaaataaggctgctttgtaatcaaggaatatttttattgattgaaggaaatgactgtactgcgattcaaaagtaaacttattttattatacagattatttcttaaaaactctatttataccttaacatgaaatccatgaccacaccaaacttggttattcataatttttcctgttaaatataaaacactgtaagttaaaaacagtaatgccaacattgaatttatttttgaggtcaaagaaccagttgttctttttatatttagatgaggatgattgagtccatatactatgtatgtttacatatactatacatgcacattaggtgttttcatttgtgttttgcttatgaaatgtcatttaaagttcacttcttgagcatcaataaaaagggaagctgtgtggttttgg

SEQ ID NO: 129 - protein, 142 aa, Homo Sapiens
MSLMVSAGRGLGAVWSPTHVQVTVLQARGLRAKGPGGTSDAYAVIQVGKEKYATSVSERSLGAPVWREEATFELPSLLSSGPAAAATLQLTVLHRALLGLDKFLGRAEVDLRDLHSSLGKSFFKTLKKRAWAIFLRLCLKKN

SEQ ID NO: 130 - DNA, 1390 bp, Homo Sapiens
gtggaggccgccagtcgcggcgatcttctcctcgcttctggagtgttatcgtcaccatgtccctaatggtctcggctggccggggcctgggggccgtgtggtccccaacccacgtgcaggtgacggtgctgcaggcgcggggcctgcgggccaagggccccgggggcacgagcgacgcgtacgcggtgatccaggtgggcaaggagaagtacgccacctccgtgtcggagcgcagcctgggcgcgcccgtgtggcgcgaggaggccaccttcgagctgccatcgctgctgtcctccggacccgcggccgccgccaccctgcagctcaccgtgctgcaccgcgcgctgctcggcctcgacaagttcctgggccgcgccgaggtggacctgcgggatctgcactccagcctgggcaagagtttttttaagactcttaaaaaaagagcctgggcaatttttttaagactctgtcttaaaaaaaactaaaaagaaaaaaagaagccccttcactctacaggggacaggagaccatggattggaccccaaagggattgaactgcatctgcatgtctgtcctttgaacactttctctccctgcccaaaaggaaacccaaattatttgtgggatactggggaaattgtagtgaagggcttaatgtagttaataaaagttaaaagtcagtagaaaacaggtgcctcagccttcaaatggttgctttttttccattttccctcatgaatagactcaccagcattttacccccttgttataaaactgtgcagagcaagaagatgatacttatttttgaatttgtatttttaaaactagatttatagactttttttttttttaactagggcacttgcttccttcttagctaaaagcaccagctgagatttttcaggtaattttgttgttactcacttaagactggaattagaatgtttctggtatttctcatttttttccctggctatgatagaatctcatctaatcttgacatctctcctaggggaagaatatcacaggctaatagcgtggttgggggtgaagatgatagcagttattaaatcaggaatctcttttatgtatgtccttgttacattgaggttaagagacaaaatcattggcagtgcaatctctttccaggatttcgtttgctgtggcattggttatatcagagcactttaatctgaaggatgatactgtaacttgatttatctaattagcttttaattatctacagctattttattttatttaattctctcctacagtactgggaccactgtaaacttctcagatgacttgtatttttgtagtgctatgaaatttatttacatacttataaagaaaactgtatgttcacttgaaaaaaaaaaaaaaaaaa

SEQ ID NO: 131 - protein, 289 aa, Homo Sapiens
MCAFPWLLLLLLLQEGSQRRLWRWCGSEEVVAVLQESISLPLEIPPDEEVENIIWSSHKSLATVVPGKEGHPATIMVTNPHYQGQVSFLDPSYSLHISNLSWEDSGLYQAQVNLRTSQISTMQQYNLCVYRWLSEPQITVNFESSGEGACSMSLVCSVEKAGMDMTYSWLSRGDSTYTFHEGPVLSTSWRPGDSALSYTCRANNPISNVSSCPIPDGPFYADPNYASEKPSTAFCLLAKGLLIFLLLVILAMGLWVIRVQKRHKMPRMKKLMRNRMKLRKEAKPGSSPA

SEQ ID NO: 132 - DNA, 1139 bp, Homo Sapiens
actaggagcctcctaatgcagtcttctgcacagtcctggggactgactgactgaatcacacctctggggctgggggctgctgacatgtgtgcctttccttggctgcttcttctcctgctgctccaggagggcagccaaaggagactctggagatggtgtggatccgaggaagtggttgcggtccttcaggagtccatcagcctccccctggaaataccaccagatgaagaggttgagaacatcatctggtcctctcacaaaagtcttgccactgtggtgccagggaaagagggacatccagctaccatcatggtgaccaatccacactaccagggccaagtgagcttcctggaccccagctattccctgcatatcagcaatctgagctgggaggattcagggctttaccaagctcaagtcaacctgagaacatcccagatctctaccatgcagcagtacaatctatgtgtctaccgatggctgtcagagccccagatcactgtgaactttgagagttctggggaaggtgcctgcagtatgtccctggtgtgctctgtggagaaggcaggcatggatatgacctacagctggctctcccggggggatagcacttatacattccatgaaggccctgtcctcagcacatcctggaggccgggggacagtgccctctcctacacctgcagagccaacaaccccatcagcaacgtcagttcttgccccatccctgatgggcccttctatgcagatcctaactatgcttctgagaagccttcaacagccttctgcctcctggccaagggattgctcatcttcttgctcttggtaattctggccatgggactctgggtcatccgagtccagaaaagacacaaaatgccaaggatgaagaaactcatgagaaacagaatgaaattgaggaaggaggcaaagcctggctccagccctgcctgactgctccttgggaaccccagtcctgagcttggtttcttcccagcacccagagaatccttcctcagctctcttctttccaggggaaggaggtgctcaggggtgggtatccagagagccatacttctgagggaagactggctggcaataaagtcaaattaagtgaccaccaaaaaaaaaaaaaaaaa

SEQ ID NO: 133 - protein, 106 aa, Homo Sapiens
MIEEKSDIETLDIPEPPPNSGYECQLRLRLSTGKDLKLVVRSTDTVFHMKRRLHAAEGVEPGSQRWFFSGRPLTDKMKFEELKIPKDYVVQVIVSQPVQNPTPVEN

SEQ ID NO: 134 - DNA, 2540 bp, Homo Sapiens
atatcagcttccagtgtattgcttggcaccgccaatcaacatgatagaggaaaagagcgacatagagactctggatattcctgagccaccacccaattctggatatgaatgtcagcttcgtttgcgcctttccacaggcaaagacctcaagcttgtggttcgcagcacagacacagtattccacatgaagagacggttgcatgcagcagagggagtggaaccaggtagtcagcggtggtttttttctggcagacctctcactgacaaaatgaagttcgaagagctgaagatcccaaaggactatgttgtacaggttatagtgagccaacctgtgcagaacccaacaccagtggagaactgaactgagccctgttggccagctcccacatccctctgctcctttttatggttcttgttgtcatttcctactctgcggcgtgaaatctatttcactgctctaaattccctatgaatggatttagttctgaggaattaccagtgaaaaattccatctgtgatggagaccaacaaaaataataaaacacaaagagccaggctttgagactcatgtaattacaatttctaatttgaaaggcagttaagaaatagataaccatttattttagaacactcaacaactatgtaatggctatatttcagtgacttggactgtaaatgaaacattgcatccatgaaggacagcaccaagcacctttttgaatacagaatttttttagaaaaatatatcaaattatataatttccagaaaccataaataatggatataaaacttaacctttttgttttgttttgttttgttttgttttgttttgttttggttaatggaaactgaaaagagcagtatttgaggttgcttctattctggttttttattcttagctcaattaatatttagccataaatgagtagagactggcaaattgtgctttagtgttgctttcctcatccccacatcttgagctccttatttacattcacactaaattttggtgccttccagcacattagtggcaggcacccttctggaacactaggcaataatttcatcaatacagtcaggtctcttgagtttcaacagatactcagttgaaaagtcgctgtcatcttgctgcataagtattttgaaaggtctgtataacgaagccatttttatatccaggcttagaaggtcactactatatagtaccttcattgatctatctattctgcttggaacttttcatagctaagtataacccccaaatgcatggttcctgggtcaggagacaccaaaatcaattatagctgttcccactcaagttaataaagtaaatgatttcctccactttgcatggaggggtgtaaggaaagcctattttatctgtgcctgggagaactgtgcctattttcagtcttttagaggaaatttcaactcaaaatttttaagtgtgaaaggtttactggtgtcacataaacattagcagtgagaccaaataatgaaacattgctttataccttagtgctttccagttcactgttacctctagtcatggtagatgacaattttcctccctcatcttttgtagcaaagaagcaaattaagagccttttgcaagttagattaggggactgaaaaatccagggagataacctgattcttctatactatgactggagtaaagctgccaagagttaggttgaatttggagccttttaaaagttggttccataagtgagaaggggggctaacatgtgaccactgtgcccctgagaatccatgagatggaaaagtacagacaagaaggcacttaacgctgttctcagttggaaaatgtcagccctccacacctgtttggatgtgaagtgcattattaattttaatgacaaaatgaaactgctaattagtttaaatgtaatgtttaaatggtattgaatttcctattgcctgattaaatatatctgtaattgtaacatcatgtttctgagagctttaactacttccttatttttatgcaatcattttaaagattgtggctatatctaatttaaatttgctgatgattgaatctaaattcaagtgaagaccacagcattaatcccaaaggagattttttttatgtttagaggtggagatattagggtaaatcagtatattgctcctgtcatcaaagtttttgttcatttgtgtgccacatcgaatagcagcacttctcaaagtttgtcaactggaaaaaagtgtttaaaactgtttttttcttaagcagatttggtgatgtcatcaatatctatgatatcgattggtaaaaggtctttctttgttgaggatttgagctctctttttaagagtttattttattttaaaggaacatatgctttgaataacaattctctgggcatgtttaactaacctaggtgggaaaaccatggtgctgtttaattgtaaatagattgatataagattggaccagtacttgatgtgtataattttagtatgtagggtttatgtgctttttttaaaaaaaaaaaaaaggttcaatttt

SEQ ID NO: 135 - skipped

SEQ ID NO: 136 - DNA, 367 bp, Homo Sapiens
ggaaggtattagacaaacatgcccatgaaaccccagcttcccttttctatgtgctaggcatggaaacttatgaaattttagcactccaaagtcatttggacttcaaggcatttaaaatcatttttctaaggatttaaacagctccactataagtcttcacctgacatgaattggtgagagaccaggctgatcctggcaaaggtcttgtgtctttctgccaggcaaaatcctgggttcttctagcaggacctaagccagtctggggacgctgatattgaggatgagctgggggactctgctctgtcctctgtgaacacacaggaggcccatccagagtgagtgaggttgattctctctccctctttgc

SEQ ID NO: 137 - protein, 543 aa, Homo Sapiens
MGTSLSPNDPWPLNPLSIQQTTLLLLLSVLATVHVGQRLLRQRRRQLRSAPPGPFAWPLIGNAAAVGQAAHLSFARLARRYGDVFQIRLGSCPIVVLNGERAIHQALVQQGSAFADRPAFASFRVVSGGRSMAFGHYSEHWKVQRRAAHSMMRNFFTRQPRSRQVLEGHVLSEARELVALLVRGSADGAFLDPRPLTVVAVANVMSAVCFGCRYSHDDPEFRELLSHNEEFGRTVGAGSLVDVMPWLQYFPNPVRTVFREFEQLNRNFSNFILDKFLRHCESLRPGAAPRDMMDAFILSAEKKAAGDSHGGGARLDLENVPATITDIFGASQDTLSTALQWLLLLFTRYPDVQTRVQAELDQVVGRDRLPCMGDQPNLPYVLAFLYEAMRFSSFVPVTIPHATTANTSVLGYHIPKDTVVFVNQWSVNHDPVKWPNPENFDPARFLDKDGLINKDLTSRVMIFSVGKRRCIGEELSKMQLFLFISILAHQCDFRANPNEPAKMNFSYGLTIKPKSFKVNVTLRESMELLDSAVQNLQAKETCQ

SEQ ID NO: 138 - DNA, 5128 bp, Homo Sapiens
actctggagtgggagtgggagcgagcgcttctgcgactccagttgtgagagccgcaagggcatgggaattgacgccactcaccgacccccagtctcaatctcaacgctgtgaggaaacctcgactttgccaggtccccaagggcagcggggctcggcgagcgaggcacccttctccgtccccatcccaatccaagcgctcctggcactgacgacgccaagagactcgagtgggagttaaagcttccagtgagggcagcaggtgtccaggccgggcctgcgggttcctgttgacgtcttgccctaggcaaaggtcccagttccttctcggagccggctgtcccgcgccactggaaaccgcacctccccgcagcatgggcaccagcctcagcccgaacgacccttggccgctaaacccgctgtccatccagcagaccacgctcctgctactcctgtcggtgctggccactgtgcatgtgggccagcggctgctgaggcaacggaggcggcagctccggtccgcgcccccgggcccgtttgcgtggccactgatcggaaacgcggcggcggtgggccaggcggctcacctctcgttcgctcgcctggcgcggcgctacggcgacgttttccagatccgcctgggcagctgccccatagtggtgctgaatggcgagcgcgccatccaccaggccctggtgcagcagggctcggccttcgccgaccggccggccttcgcctccttccgtgtggtgtccggcggccgcagcatggctttcggccactactcggagcactggaaggtgcagcggcgcgcagcccacagcatgatgcgcaacttcttcacgcgccagccgcgcagccgccaagtcctcgagggccacgtgctgagcgaggcgcgcgagctggtggcgctgctggtgcgcggcagcgcggacggcgccttcctcgacccgaggccgctgaccgtcgtggccgtggccaacgtcatgagtgccgtgtgtttcggctgccgctacagccacgacgaccccgagttccgtgagctgctcagccacaacgaagagttcgggcgcacggtgggcgcgggcagcctggtggacgtgatgccctggctgcagtacttccccaacccggtgcgcaccgttttccgcgaattcgagcagctcaaccgcaacttcagcaacttcatcctggacaagttcttgaggcactgcgaaagccttcggcccggggccgccccccgcgacatgatggacgcctttatcctctctgcggaaaagaaggcggccggggactcgcacggtggtggcgcgcggctggatttggagaacgtaccggccactatcactgacatcttcggcgccagccaggacaccctgtccaccgcgctgcagtggctgctcctcctcttcaccaggtatcctgatgtgcagactcgagtgcaggcagaattggatcaggtcgtggggagggaccgtctgccttgtatgggtgaccagcccaacctgccctatgtcctggccttcctttatgaagccatgcgcttctccagctttgtgcctgtcactattcctcatgccaccactgccaacacctctgtcttgggctaccacattcccaaggacactgtggtttttgtcaaccagtggtctgtgaatcatgacccagtgaagtggcctaacccggagaactttgatccagctcgattcttggacaaggatggcctcatcaacaaggacctgaccagcagagtgatgattttttcagtgggcaaaaggcggtgcattggcgaagaactttctaagatgcagctttttctcttcatctccatcctggctcaccagtgcgatttcagggccaacccaaatgagcctgcgaaaatgaatttcagttatggtctaaccattaaacccaagtcatttaaagtcaatgtcactctcagagagtccatggagctccttgatagtgctgtccaaaatttacaagccaaggaaacttgccaataagaagcaagaggcaagctgaaattttagaaatattcacatcttcggagatgaggagtaaaattcagtttttttccagttcctcttttgtgctgcttctcaattagcgtttaaggtgagcataaatcaactgtccatcaggtgaggtgtgctccatacccagcggttcttcatgagtagtgggctatgcaggagcttctgggagatttttttgagtcaaagacttaaagggcccaatgaattattatatacatactgcatcttggttatttctgaaggtagcattctttggagttaaaatgcacatatagacacatacacccaaacacttacaccaaactactgaatgaagaagtattttggtaaccaggccatttttggtgggaatccaagattggtctcccatatgcagaaatagacaaaaagtatattaaacaaagtttcagagtatattgttgaagagacagagacaagtaatttcagtgtaaagtgtgtgattgaaggtgataagggaaaagataaagaccagaaattcccttttcaccttttcaggaaaataacttagactctagtatttatgggtggatttatccttttgccttctggtatacttccttacttttaaggataaatcataaagtcagttgctcaaaaagaaatcaatagttgaattagtgagtatagtggggttccatgagttatcatgaattttaaagtatgcattattaaattgtaaaactccaaggtgatgttgtacctcttttgcttgccaaagtacagaatttgaattatcagcaaagaaaaaaaaaaaagccagccaagctttaaattatgtgaccataatgtactgatttcagtaagtctcataggttaaaaaaaaaagtcaccaaatagtgtgaaatatattacttaactgtccgtaagcagtatattagtattatcttgttcaggaaaaggttgaataatatatgccttgtgtaatattgaaaattgaaaagtacaactaacgcaaccaagtgtgctaaaaatgagcttgattaaatcaaccacctatttttgacatggaaatgaagcagggtttcttttcttcactcaaattttggcgaatctcaaaattagatcctaagatgtgttcttatttttataacatctttattgaaattctatttataatacagaatcttgttttgaaaataacctaattaatatattaaaattccaaattcatggcatgcttaaattttaactaaattttaaagccattctgattattgagttccagttgaagttagtggaaatctgaacattctcctgtggaaggcagagaaatctaagctgtgtctgcccaatgaataatggaaaatgccatgaattacctggatgttctttttacgaggtgacaagagttggggacagaactcccattacaactgaccaagtttctcttctagatgattttttgaaagttaacattaatgcctgctttttggaaagtcagaatcagaagatagtcttggaagctgtttggaaaagacagtggagatgaggtcagttgtgttttttaagatggcaattactttggtagctgggaaagcataaagctcaaatgaaatgtatgcattcacatttagaaaagtgaattgaagtttcaagttttaaagttcattgcaattaaacttccaaagaaagttctacagtgtcctaagtgctaagtgcttattacattttattaagctttttggaatctttgtaccaaaattttaaaaaagggagtttttgatagttgtgtgtatgtgtgtgtggggtggggggatggtaagagaaaagagagaaacactgaaaagaaggaaagatggttaaacattttcccactcattctgaattaattaatttggagcacaaaattcaaagcatggacatttagaagaaagatgtttggcgtagcagagttaaatctcaaataggctattaaaaaagtctacaacatagcagatctgttttgtggtttggaatattaaaaaacttcatgtaattttattttaaaatttcatagctgtacttcttgaatataaaaaatcatgccagtatttttaaaggcattagagtcaactacacaaagcaggcttgcccagtacatttaaattttttggcacttgccattccaaaatattatgccccaccaaggctgagacagtgaatttgggctgctgtagcctatttttttagattgagaaatgtgtagctgcaaaaataatcatgaaccaatctggatgcctcattatgtcaaccaggtccagatgtgctataatctgtttttacgtatgtaggcccagtcgtcatcagatgcttgcggcaaaagaaagctgtgtttatatggaagaaagtaaggtgcttggagtttacctggcttatttaatatgcttataacctagttaaagaaaggaaaagaaaacaaaaaacgaatgaaaataactgaatttggaggctggagtaatcagattactgctttaatcagaaaccctcattgtgtttctaccggagagagaatgtatttgctgacaaccattaaagtcagaagttttactccaggttattgcaataaagtataatgtttattaaatgcttcatttgtatgtcaaagctttgactctataagcaaattgcttttttccaaaacaaaaagatgtctcaggtttgttttgtgaattttctaaaagctttcatgtcccagaacttagcctttacctgtgaagtgttactacagccttaatattttcctagtagatctatattagatcaaatagttgcatagcagtatatgttaatttgtgtgtttttagctgtgacacaactgtgtgattaaaaggtatactttagtagacatttataactcaaggataccttcttatttaatcttttcttatttttgtactttatcatgaatgcttttagtgtgtgcataatagctacagtgcatagttgtagacaaagtacattctggggaaacaacatttatatgtagcctttactgtttgatataccaaattaaaaaaaaattgtatctcattacttatactgggacaccattaccaaaataataaaaatcactttcataatcttgaaaaaa

SEQ ID NO: 139 - protein, 949 aa, Homo Sapiens
MDISTRSKDPGSAERTAQKRKFPSPPHSSNGHSPQDTSTSPIKKKKKPGLLNSNNKEQSELRHGPFYYMKQPLTTDPVDVVPQDGRNDFYCWVCHREGQVLCCELCPRVYHAKCLRLTSEPEGDWFCPECEKITVAECIETQSKAMTMLTIEQLSYLLKFAIQKMKQPGTDAFQKPVPLEQHPDYAEYIFHPMDLCTLEKNAKKKMYGCTEAFLADAKWILHNCIIYNGGNHKLTQIAKVVIKICEHEMNEIEVCPECYLAACQKRDNWFCEPCSNPHPLVWAKLKGFPFWPAKALRDKDGQVDARFFGQHDRAWVPINNCYLMSKEIPFSVKKTKSIFNSAMQEMEVYVENIRRKFGVFNYSPFRTPYTPNSQYQMLLDPTNPSAGTAKIDKQEKVKLNFDMTASPKILMSKPVLSGGTGRRISLSDMPRSPMSTNSSVHTGSDVEQDAEKKATSSHFSASEESMDFLDKSTASPASTKTGQAGSLSGSPKPFSPQLSAPITTKTDKTSTTGSILNLNLDRSKAEMDLKELSESVQQQSTPVPLISPKRQIRSRFQLNLDKTIESCKAQLGINEISEDVYTAVEHSDSEDSEKSDSSDSEYISDDEQKSKNEPEDTEDKEGCQMDKEPSAVKKKPKPTNPVEIKEELKSTSPASEKADPGAVKDKASPEPEKDFSEKAKPSPHPIKDKLKGKDETDSPTVHLGLDSDSESELVIDLGEDHSGREGRKNKKEPKEPSPKQDVVGKTPPSTTVGSHSPPETPVLTRSSAQTSAAGATATTSTSSTVTVTAPAPAATGSPVKKQRPLLPKETAPAVQRVVWNSSSKFQTSSQKWHMQKMQRQQQQQQQQNQQQQPQSSQGTRYQTRQAVKAVQQKEITQSPSTSTITLVTSTQSSPLVTSSGSMSTLVSSVNADLPIATASADVAADIAKYTSKVNGCNKRNNDRNIQRSF

SEQ ID NO: 140 - DNA, 4147 bp, Homo Sapiens
ggagtgtagaggaaataaaatcatgtctgtggctcatgacagcattccatattcagttgttgggttgtgttgttgttgttgtgtgtgtttttaataataccatgtaactgtttaaaaaaatttcctttttgatcaagtcccaaatctgccagcctgttctctcttcctaactgtggaaaaatgagacggttgcttgaacatttgttggcttggctgaagaggaaataaaaacagaacaggaggtggtagagggcatggatatctctactcgctccaaagatcctggctctgcagagagaacagcccagaaaagaaagttccccagccctccacattcttccaatggccactcgccgcaggacacatcaacaagccccattaaaaagaaaaagaaacctggcttactgaacagtaacaataaggagcagtcagaactaagacatggtccgttttactatatgaagcagccactcaccacagaccctgttgatgttgtaccgcaggatggacggaatgatttctactgctgggtttgtcaccgggaaggccaagtcctttgctgtgagctctgtccccgggtttatcacgctaagtgtctgagactgacatcggaaccagagggggactggttttgtcctgaatgtgagaaaattacagtagcagaatgcatcgagacccagagtaaagccatgacaatgctcaccattgaacagttatcctacctgctcaagtttgccattcagaaaatgaaacagccagggacagatgcattccagaagcccgttccattggaacagcaccctgactatgcggaatacatcttccatccaatggacctttgtacattggaaaagaatgcgaaaaagaaaatgtatggctgcacagaagccttcctggctgatgcaaagtggattttgcacaactgcatcatttataatgggggaaatcacaaattgacgcaaatagcgaaagtagtcatcaaaatctgtgaacatgagatgaatgaaatcgaagtatgtccagaatgttatctagctgcttgccaaaaacgagataactggttttgtgagccttgtagcaatccacatcctttggtctgggccaaactgaaggggtttccattctggcctgcaaaagctctaagggataaagacgggcaggtcgatgcccgattctttggacaacatgacagggcctgggttccaataaataattgctacctcatgtctaaagaaattcctttttctgtgaaaaagactaagagcatcttcaacagtgccatgcaagagatggaggtttacgtggagaacatccgcaggaagtttggggtttttaattactctccatttaggacaccctacacacccaacagccagtatcaaatgctgctcgatcccaccaaccccagcgccggcactgccaagatagacaagcaggagaaggtcaagctcaactttgacatgacggcatcccccaagatcctgatgagcaagcctgtgctgagtgggggcacaggccgccggatttccttgtcggatatgccgcgctcccccatgagcacaaactcttctgtgcacacgggctccgacgtggagcaggatgctgagaagaaggccacgtcgagccacttcagtgcgagcgaggagtccatggacttcctggataagagcacagcttcaccagcctccaccaagacgggacaagcagggagtttatccggcagcccaaagcccttctctcctcaactgtcagctcctatcacgacgaaaacggacaaaacctccaccaccggcagcatcctgaatcttaacctggatcgaagcaaagctgagatggatttgaaggagctgagcgagtcggtccagcaacagtccacccctgttcctctcatctctcccaagcgccagattcgtagcaggttccagctgaatcttgacaagaccatagagagttgcaaagcacaattaggcataaatgaaatctcggaagatgtctatacggccgtagagcacagcgattcggaggattctgagaagtcagatagtagcgatagtgagtatatcagtgatgatgagcagaagtctaagaacgagccagaagacacagaggacaaagaaggttgtcagatggacaaagagccatctgctgttaaaaaaaagcccaagcctacaaacccagtggagattaaagaggagctgaaaagcacgtcaccagccagcgagaaggcagaccctggagcagtcaaggacaaggccagccctgagcctgagaaggacttttccgaaaaggcaaaaccttcacctcaccccataaaggataaactgaagggaaaagatgagacggattccccaacagtccatttgggcctggactctgattcagagagcgaacttgtcatagatttaggagaagaccattctgggcgggagggtcgaaaaaataagaaggaacccaaagaaccatctcccaaacaggatgttgtaggtaaaactccaccatccacgacggtgggcagccattctcccccggaaacaccggtgctcacccgctcttccgcccaaacttccgcggctggcgccacagccaccaccagcacgtcctccacggtcaccgtcacggccccggcccccgccgccacaggaagcccagtgaaaaagcagaggccgcttttaccgaaggagactgccccggccgtgcagcgggtcgtgtggaactcatcaagtaagtttcaaacgtcctcccaaaagtggcacatgcagaagatgcagcgtcagcagcagcagcagcagcagcaaaaccagcagcagcagcctcagtcttcccaggggacgagatatcagaccagacaggctgtgaaagctgtccagcagaaggagatcacacagagcccatccacgtccaccatcaccctggtgaccagcacacagtcatcgcccctggtcaccagctcggggtccatgagcacccttgtgtcctcagtcaacgctgacctgcccatcgccactgcctcagctgatgtcgccgctgatattgccaagtacactagcaaaatgatggatgcaataaaaggaacaatgacagaaatatacaacgatctttctaaaaacactactggaagcacaatagctgagattcgcaggctgaggatcgagatagagaagctccagtggctgcaccagcaagagctctccgaaatgaaacacaacttagagctgaccatggcggagatgcggcagagcctggagcaggagcgggaccggctcatcgccgaggtgaagaagcagctggagttggagaagcagcaggcggtggatgagaccaagaagaagcagtggtgcgccaactgcaagaaggaggccatcttttactgctgttggaacaccagctactgtgactacccctgccagcaagcccactggcctgagcacatgaagtcctgcacccagtcagctactgctcctcagcaggaagcggatgctgaggtgaacacagaaacactaaataagtcctcccaggggagctcctcgagcacacaatcagcaccttcagaaacggccagcgcctccaaagagaaggagacgtcagctgagaaaagcaaggagagtggctcgacccttgacctttctggctccagagagacgccctcctccattctcttaggctccaaccaaggctctgaccattcccggagtaataaatccagttggagcagcagtgatgagaagaggggatcgacacgttccgatcacaacaccagtaccagcacgaagagcctcctcccgaaagagtctcggctggacaccttctgggactagcagtgaatcgggacacaaaccacccaccccattgggagaaaaacccagacgccaggaaaagaagaaacaacaaaggcaggagaacagccactttcagacttgaaaatgacaaaaccctcagttgagcctgagcccccggcgcgggggctgctacactacaggacacccagcatcggctttgactgcagactgttcacccacacgagccctgtgcttttggtgtaaataatgtacaatttgtggatgtcattgaatctagaggactttcccctttttatatttgtattaactttaacttattaaaaaaaaaaaaagaaaaagaaaaacgattt

SEQ ID NO: 141 - protein, 84 aa, Homo Sapiens
MALSSQIWAACLLLLLLLASLTSGSVFPQQTGQLAELQPQDRAGARASWMPMFQRRRRRDTHFPICIFCCGCCHRSKCGMCCKT

SEQ ID NO: 142 - DNA, 391 bp, Homo Sapiens
tcaagacccagcagtgggacagccagacagacggcacgatggcactgagctcccagatctgggccgcttgcctcctgctcctcctcctcctcgccagcctgaccagtggctctgttttcccacaacagacgggacaacttgcagagctgcaaccccaggacagagctggagccagggccagctggatgcccatgttccagaggcgaaggaggcgagacacccacttccccatctgcattttctgctgcggctgctgtcatcgatcaaagtgtgggatgtgctgcaagacgtagaacctacctgccctgcccccgtcccctcccttccttatttattcctgctgccccagaacataggtcttggaataaaatggctggttcttttgttttcc

SEQ ID NO: 143 - skipped

SEQ ID NO: 144 - DNA, 399 bp, Homo Sapiens
  misc_feature 359: n = A,T,C or G
aaagtccttgtaacattgagttacagggctttaactcctgtgtctgaaaaatcacaaacactgatgacaatcaaagcctcatcttaaggccccgtagaagatgccaatcaaaataaactgcattcctgaggcactaggcaagaaattaaagctattcaactcctcaaggcccagggactattgcggaagaggtgggcgcgtaagattgtaagggccgattttgaaagatccagtaagttcagtttctctatgaactaatcattcaagtcaaaggcacactgatgcaaaatcagtatatgggacccctgtgtctggattaggcaaggtttttcttggaagcctttaaccaactccttccntaaagggttattaaaagggcttatggggagttattatttt

SEQ ID NO: 145 - protein, 374 aa, Homo Sapiens
MGLPRGSFFWVLLLLTAACSGLLFALYFSAVQRYPGPAAGARDTTSFEAFFQSKASNSWTGKGQACRHLLHLAIQRHPHFRGLFNLSIPVLLWGDLFTPALWDRLSQHKAPYGWRGLSHQVIASTLSLLNGSESAKLFAPPRDTPPKCIRCAVVGNGGILNGSRQGPNIDAHDYVFRLNGAVIKGFERDVGTKTSFYGFTVNTMKNSLVSYWNLGFTSVPQGQDLQYIFIPSDIRDYVMLRSAILGVPVPEGLDKGDRPHAYFGPEASASKFKLLHPDFISYLTERFLKSKLINTHFGDLYMPSTGALMLLTALHTCDQVSAYGFITSNYWKFSDHYFERKMKPLIFYANHDLSLEAALWRDLHKAGILQLYQR

SEQ ID NO: 146 - DNA, 1908 bp, Homo Sapiens
gggacgtcagcggacggggcgctcgcgggccggggctgtatggggctcccgcgcgggtcgttcttctgggtgctgctcctgctcacggctgcctgctcggggctcctctttgccctgtacttctcggcggtgcagcggtacccggggccagcggccggagccagggacaccacatcatttgaagcattctttcaatccaaggcatcgaattcttggacaggaaagggccaggcctgccgacacctgcttcacctggccattcagcggcacccccacttccgtggcctgttcaatctctccattccagtgctgctgtggggggacctcttcaccccagcgctctgggaccgcctgagccaacacaaagccccgtatggctggcgggggctctctcaccaagtcatcgcctccaccctgagccttctgaacggctcagagagtgccaagctgtttgccccgcccagggacacccctccaaagtgtatccggtgtgccgtggtgggcaacggaggcattctgaatgggtcccgccagggtcccaacatcgatgcccatgactatgtattcagactcaatggagctgtgatcaaaggcttcgagcgcgatgtgggcaccaagacttccttctatggtttcactgtgaacacgatgaagaactccctcgtctcctactggaatctgggcttcacctccgtgccacaaggacaggacctgcagtatatcttcatcccctcagacatccgcgactatgtgatgctgagatcggccattctgggcgtgcctgtccctgagggcctagataaaggggacaggccgcacgcctattttggaccagaagcctctgccagtaaattcaagctgctacatccggacttcatcagctacctgacagaaaggttcttgaaatcaaagttgattaacacacattttggagacctatatatgcctagtaccggggctctcatgctgctgacagctttgcatacctgtgaccaggtcagtgcctatggattcatcacaagcaactactggaaattttccgaccactatttcgaacgaaaaatgaagccattgatattttatgcaaaccacgatctgtccctggaagctgccctgtggagggacctgcacaaggccggcatccttcagctgtaccagcgctgaccccaatgcactgagcgctttgcttcttcaagagttgcggccctgatcctctcaagtggccaaaagcttttttaacttttcaatcttcaccttcccttgccaacagagggcactggggtgaattcaagattttcatcgaggtctgttcaatataggacaccccagcttgtccttggctcatccaagaactcttctgtatctaaaacaatacatctcaatcttggccaagggaaaatggactgctttgctggattggcactgagcaactttaggaaatgtcggtggagtgttcagcaagatcagacagcagtccaggtcaaaggcaaacacacacgctccagcccaaatcctcctggtggcacatcctaccccagatgctaaagtgattcaaggactccaggacacctcttaagagcctttctaagaacatgataggcttacttctgctccataataaagtgggagaaaaaagccagaatataacttaagactagataactgcgtacatgatggaccattttttttttttttggctgggtagagaaatcatataaaacgcaggctgtttagcatggagatgactctcagaacactgggagggtctggcacttgatgggggttagttgcttggcagcctgcctgccactgagggaagtcccattagagatgtatcaccaccttgtcaccaacaggatgatgtcaccaacaggatgatgtcaccaggtaataaaccttcatcctcac

SEQ ID NO: 147 - skipped

SEQ ID NO: 148 - DNA, 3104 bp, Homo Sapiens
ggggataagttttttttttttcttttttttcttttctctagtttttctttctggctgagatttccgtgcaagacagcacccaatagactatttagagttgacatttgacattttaatgggcgccatggctcattttgtagattgagaaggtgcgtctcccctgctccaagtctcatcatgacagcgtgctgacagctgggagtctgtggccttcctcacgcagaggccttaaagctggacacagatgcacgcctaggctgggcagggatgggacccatgccccctccttagaggacgggcttcctggttaggaaaggacacgtgggggtgccttgcataatagttcactggtcaccgtgcttttatgagtagtgtttttgtgcacttgccaggggttttctctctgtgtgcgaggggagtgatttaagcaatggtgtctggagtaagccttacaattttaatagactttttcttatcatatccctcatttctttccctgaaataaaaatacacacaagcaaaaaaaaaatgatagtttcacatctcttagttcccttgcccaaacaagaatattcttagttccactggccaggattttcctacatagtcagaacttacacattactagaggcacacccaccaaggagtattgtgtctacttttatctgtgcaccagccacaaatacccacattggaaagacccatttgtgatgggtaaacatcccttcctgtctcccacaacccctgtgactgccctgcatgtgttcatgacctccgaaggccctaattcatgaagcagcaaacccagcagatctccacccccctgcctcaggacctctgctgaagagggggatgaagtgggtctccagggaggcagtgggggccttgttggcagctggctcgggagccggcttacaggagggcagctctgcagttgggaggggcaccgtccggaggagaccaggcctctacacaccccccactctacttatcatccctgctcacacacccttgtccaaggctttatgcatcggatttatttttccaaatcgagaggacagtgatagatgcattttccccaggctgtctcagaaaggtcgctaaatgtatactgttgtcagaattgctgagatctccccccacttttggtttttgcagcagtaaaaactctttccactgtgacttattttctctctcaggcagccagccacctggtcccttgtgctgactctagcacagtggccaggatccaatacgagtccaggggtgaccgcaggatggtgggggcagcgggcttctccacctaccccagccaccaaggccctgacgcactgcctcctgcaccttcagcacatccctgtgcacagctggaagggtgcatggcccgctcacctttgttcagatgggtggaaacgctgatgataccagctcctccctgccgtgcccctgccacggagcaggcattgtgaactggctggtgtttgcagtcccacgtggcatggcctccagcccaacccacagtggagactggagacagggcaatgagtctggtcgggggcacgtggacatgccccataggggccccacccagacttaacaggcaaggtcctgggcattgcgcgacgcaggactcaatgctaaagcaagcctgcctggctctgtgccagggcccctcttctgatttacacatcccatttttacacagacccttccttcttaataaaggctgacagttctgttggcagccaagaacccacaccatgaagacagggagtgaggggcctttgtgcccaactccagcacagctgcgttctggggtgtgtgagaggcatgttcgtgtctgtgcgctggtggtctcgtgagacagttccgaggacggggaaattgcagggtggtgggggcgtgaggcttatatgtggaactgatgcagagttcgcctgcagacggatctggatatacactatgtataattgttacgtgtaatttaaaatatatctgtttgccatcgtcatgagaagattatatgtaaggctctgaagggagagggagatgtacattctgccaggctcctggggaccttatccgagtcatgaaattgatgactgttgatccagtggtgcaagaagctacactccatgtgtcatcacgcttatgactcctaatgtatttttaaggcaaaaaatgtcagccgactccatcttcacccctcgattcctcgagtccagcctttctgtgccagtgcttcactgagccacaacgctctcgccatcgggacccggctgggcctggagtctcggggcacagttgccatggagccctcctgggtcattctacaaatgtgctgagtgccagctgaaaaccccacaggagatggagtaccttggccaagcttaaagagaagattttctcagggtatttattagtgtgtccagcagggtcaggaagcaggatggaaagatgcattcagactgttaatttattaacaaggcaaatgattttgtgtttcttgatgacagactattaagtttgggacttattttcccatttgagaagttataatatatatttaagatgataagtttcctgcttaagttgtgcctttcagcttcaatgagtttaaggagcactaaggctaatgataccaatgagggttggtttattatcaaacctgaatagctgtggtttctccagtaaatattttcttctactgaacatggagccattattaagagttgtgtgttttttattatgtacatttgtatatttttttgcttgtttgatgttctatttttctaatagttttcttttagtttcttaaagttgtgatactagatttagattctgatgctaactgcaaatcaggttggtctctgctgggtctctcctgcttttattttactttaaggacaagtgtagttgtcgtccaccacctttcaaaaaatgtgaaactgccctgcctcccctttttgctgacaacactgtgtacattgaccacttcctaccatactttatgttgtaaaatcaaactcttttgtggtacattatctcatgcttctgcaaattcgaataaattctatggcttccaaaaaaaaaaaaaaaaaaaa

SEQ ID NO: 149 - skipped

SEQ ID NO: 150 - DNA, 1760 bp, Homo Sapiens
aagatctatgtcctggggggccgccagggcaagctcccggtgactgcttttgaagcctttgatctggaggcccgtacatggacccggcatccaagcctacccagccgtcgggcctttgctggctgcgccatggctgaaggcagcgtctttagcctgggtggcctgcagcagcctgggccccacaacttctactctcgcccacactttgtcaacactgtggagatgtttgacctggagcatggtgagcagtggctgttctgggctgtcctcccgctctctgtgggatggaggggcatagtgtgtacatgactagatctgacctcccctctcctgcagggtcctggaccaaattgccccgcagcctgcgcatgagggataagagggcagactttgtggttgggtcccttgggggccacattgtggccattgggggccttggtaagtctctatggggctggggagaggagggagtcccaagacaggaaagactagcccccagcatgtgtgtcaccttctgcccatctccaggcactccaggggtcagggctttgtgagctcttttccctatctatgaagtaggcaggatgtggtctgcctggcccagcactcagggtgttcctcagtgactgggggctctgtcaagcaccagcaagggtctacgagacagcagcaggacaaatgaccactgtatgcacagtcaagagaacatatagaaacataaatgaatgaacaaatgatgaacataggcaatgaggagcaaggccctgatagctcatcctggggtgataactactgggctattctctgggcttagggagcagaagggcctggagtccctacggcctgtgcctctcacagccttctctctccttcttgcaggaaaccagccatgtcctttgggctctgtggagagctttagccttgcacggcggcgctgggaggcattgcctgccatgcccactgcccgctgctcctgctctagtctgcaggctgggccccggctgtttgttattgggggtgtggcccagggccccagtcaagccgtggaggcactgtgtctgcgtgatggggtctgaaggcttggtgggagctgtccactggagcagctcattgccagaggcagctatttctatggctccttttgctgctgaggacactcactgtggctctgtgggatgagagaggcatgggggtgagcacttgaaacactgccttggggccttgggttaggggagcctttgtctttagtgcaggacacacatatgcttacacctacctttatcaccattcgttcatgaatcatgcctagctccatccttgccctgggacctactaggccttccatccaactgggaaatggggagaagcaaagctggccccatgctcttcagggtcagttcctatctggagttgaccaggcctaccccagttgccattcctgaaaaatctcagctgccaggctgcctttagggtccctgtagacccaggagagttgagagggtgggggacacagagagaatagagaggatgtgggaactgccagagggccggagcgcaggagttcaagtggaggaatgctggctttgagccctctacactgctggttgtatgaccttggacaagtcacttcacctctctgtgcctcagcatcctcatctataaatggggatctctgaaaccttcctaccctacctacctcacagggctgttgtgaggacccagggagtttggatgtggaagtaaaagtgctgctaaaacct

SEQ ID NO: 151 - protein, 104 aa, Homo Sapiens
MVRSRLTAVSASWVQAHPPADMGRRKSKRKPPPKKKMTGTLETQFTCPFCNHEKSCDVKMDRARNTGVISCTVCLEEFQTPITYLSEPVDVYSDWIDACEAANQ

SEQ ID NO: 152 - DNA, 991 bp, Homo Sapiens
ggcacgaggggctcatccacctgcagacatggggcgcagaaagtcaaaacgaaagccgcctcccaagaagaagatgacaggcaccctcgagacccagttcacctgccccttctgcaaccacgagaaatcctgtgatgtgaaaatggaccgtgcccgcaacaccggagtcatctcttgtaccgtgtgcctagaggaattccagacgcccataacgtatctgtcagaacccgtggatgtgtacagtgattggatagacgcctgcgaggcggccaatcagtagcgacacagaggacccgccccctgagcagccccgcgtactgtggatccagctgttcggttctggtccagagacattccaggggtccagggtgtgggtcctgggctgtcacagccgtgtgtgtgtgtgtgtgtgtgtgtgtgtgtgtgtgtgtgtgtgtagtgggtgtgcgtgtgggtgtgggtgtgagtgagtgtgggtgtgtgtggctgcacgtgtcactggggtggccgtgagtgtgtgctcacaggtacgcggtggtgtcgggttcctgggcctgaggggcctgaactgatctcacttggctccgaaagcctttgctgtgttccctgcagcccctggccccccagccttggggctctggctccccccggcggaattgggggactgtttcctgacatcctggacaagggaagcccactagaggctggaacaggacctctccagcctcctcaccagcaccgtgcccatctcaactggacttcccgccctccttctccaccttctagtgcccgtggccggggattcaaagccgccgttccccaggtccctgggctgggccctgacagggagccgcccccctccccatggtaaccaggaagcccgtttcatgttcagttgcttttgtagaggaagcaagggctgggatggggacagctgtcaatcacaagcccttaaataaagcagccagcgcacaaaaaaaaaaaaaaaaaa

SEQ ID NO: 153 - protein, 720 aa, Homo Sapiens
MPPPSDIVKVAIEWPGANAQLLEIDQKRPLASIIKEVCDGWSLPNPEYYTLRYADGPQLYITEQTRSDIKNGTILQLAISPSRAARQLMERTQSSNMETRLDAMKELAKLSADVTFATEFINMDGIIVLTRLVESGTKLLSHYSEMLAFTLTAFLELMDHGIVSWDMVSITFIKQIAGYVSQPMVDVSILQRSLAILESMVLNSQSLYQKIAEEITVGQLISHLQVSNQEIQTYAIALINALFLKAPEDKRQDMANAFAQKHLRSIILNHVIRGNRPIKTEMAHQLYVLQVLTFNLLEERMMTKMDPNDQAQRDIIFELRRIAFDAESDPSNAPGSGTEKRKAMYTKDYKMLGFTNHINPAMDFTQTPPGMLALDNMLYLAKVHQDTYIRIVLENSSREDKHECPFGRSAIELTKMLCEILQVGELPNEGRNDYHPMFFTHDRAFEELFGICIQLLNKTWKEMRATAEDFNKVMQVVREQITRALPSKPNSLDQFKSKLRSLSYSEILRLRQSERMSQDDFQSPPIVELREKIQPEILELIKQQRLNRLCEGSSFRKIGNRRRQERFWYCRLALNHKVLHYGDLDDNPQGEVTFESLQEKIPVADIKAIVTGKDCPHMKEKSALKQNKEVLELAFSILYDPDETLNFIAPNKYEYCIWIDGLSALLGKDMSSELTKSDLDTLLSMEMKLRLLDLENIQIPEAPPPIPKEPSSYDFVYHYG

SEQ ID NO: 154 - DNA, 3595 bp, Homo Sapiens
ggagggaggtgtagaaagaggtacatggagaacaagtttgtcaatccgtctgaacttcagttgccttacctgtaaggcagccgtgtctgtgtttttgtctcgcagaattagagcccattgggaacgatgccaccaccgtcagacattgtcaaagtggccattgagtggccaggtgctaacgcccagctccttgaaatcgaccagaaacggcccctggcatccattatcaaggaagtttgtgatgggtggtcgttgccaaacccagagtattataccctccgttatgcagatggtcctcagctgtacatcaccgaacagactcgcagtgacattaagaatgggacaatcttacaactggctatctccccgtcccgggctgcacgccagctgatggagaggacccagtcatccaacatggagacccggctggatgccatgaaggagctggccaagctctctgccgacgtgactttcgctactgagttcatcaacatggatggcatcattgtgctgacaaggctcgtggaaagtggaaccaagctcttgtcccagctacagtgagatgctggcattcaccctgactgccttcctagagctcatggaccatggcattgtctcctgggacatggtttcaatcacctttattaagcagattgcagggtatgtgagccagcccatggtggacgtgtcaatccttcagaggtccctggccatcctggagagcatggtcttgaacagccagagtctgtaccagaagatagccgaggaaatcaccgtgggacagctcatctcacacctccaggtctccaaccaggagattcagacctacgccattgcactgattaatgcactttttctgaaggctcctgaggacaaacgacaggatatggcaaatgcatttgcacagaagcatctccggtctataatcctgaatcatgtgatccgagggaaccgccccatcaaaactgagatggcccatcagctatatgtccttcaagtcctaacctttaaccttctggaagaaaggatgatgaccaagatggaccccaatgaccaggctcaaagggacatcatatttgaactgaggaggattgcatttgacgcagagtctgatcctagcaatgcccctgggagtgggaccgaaaaacgcaaagccatgtacacaaaggactacaaaatgctgggatttaccaaccacatcaatccagccatggactttacccagactcctcctggaatgctggccttggacaacatgctgtacttggctaaagtccaccaggacacctacatccggattgtcttggagaacagtagccgggaagacaaacatgaatgcccctttggccgcagtgccattgagctcaccaaaatgctctgtgaaatcctgcaggttggggaactaccaaatgaaggacgcaatgactaccacccgatgttctttacccatgaccgagcctttgaagagctctttggaatctgcatccagctgttgaacaagacctggaaggagatgagggcaacagcagaggacttcaacaaggttatgcaagtcgtccgagagcaaatcactcgagctttgccctccaaacccaactctttggatcagttcaagagcaaattgcgtagcctgagttactctgagattctacgactgcgccagtctgagaggatgagtcaggatgacttccagtccccgccaattgtggagctgagggagaagatccagcccgagatccttgagctgatcaagcagcagcgcctgaaccggctctgtgagggcagcagcttccgaaagattgggaaccgccgaaggcaagaacggttctggtactgccggttggcactgaaccacaaggtccttcactatggtgacttggatgacaacccacaaggggaggtgacatttgaatccctgcaggagaaaattcctgttgcagacattaaggccattgtcactgggaaagattgtccccacatgaaagagaaaagtgctctgaaacagaacaaggaggtgttggaattggccttctccatcctgtatgaccctgatgagaccttaaacttcatcgcacctaataaatatgagtactgcatctggattgatggcctcagtgcccttctggggaaggacatgtccagtgagctgaccaagagtgacctggacaccctgctgagcatggagatgaagctgcggctcctggacctggagaacatccagattcccgaagccccaccccccatccccaaggagcccagcagctatgactttgtctatcactatggctgagcctggagccagaaacgacggtacccaggagaagggattttgggcccaggagaaacacttacattctggtgccttgtcttttgcttgtacagaatctgtagtgattttggtggccagtaaatgccagccatttctcaaacccacctcggaccacccagagtttcctcttggtccctgtctactaagagtcatgaaggcagggtgctctgcccactccatcaccatgaagcctgggattgggccacgaggaacaaacagcagatgcccttgccttccagtccaagaaactgcttcttgaaatggatttaacaacagccactcaccttttcctcctgagcctgctctctgatcagctggatccccacgtgagcaacagctggcccaggaaaggctgcctgcagaggacaggtgtgttgggcgtgttgagagccttgaagtgactacctgtatcttagatctgagtacaagcctgaggcttttgcttttgtcttttttgatgagggctcactccagcttcatatggtgccaagacgttgctgcttctgaggttggctctaacatctctggtctttagagccaccagatctctctggcccatacagatatcagagcagacggaaatttctccctgcaagcgctcagtctcatcccagcaagtcaaagacctcctggccaagtcctgccctcttaagtctccaggaacgctgcagggaaaacccagctgaggcctgggcctagactgtggtgaggtcactagattctactgctcttcccccacattaataccttttccttcctcagagagaaatctcccctaacctgaattgcagccccctccagtttgctttcctttggccttccagaccccaggaagttggccttcccttcctagtgctatggtttctgccattggccatgatttcagggagctggctgaggccggctgaggccacacctgtgccagtggggcttccctggtgctgcagcacttgtaaaccacacacacagcctctctccctggacatacgttagcacattggcattcagtattggtggcctggcatggtaggtactacccaatgaagagtgtactatatattttcattactataggccatacttatacagacgtgtatatatatttatataagatctacctatcttaggatggaaccttggggaaaaataaaattgaggggaagtaaaaagtatgtaacacttccagttgtgagccaagattgtaaccagagagcagccaggagcttcctgtcagtaaccatgttttcaataaatactctttcatgt

SEQ ID NO: 155 - skipped

SEQ ID NO: 156 - DNA, 255 bp, Homo Sapiens
agagcaatactcaagggaaaaggtgtttatttagaacaatgaaaacaatgagacattaacttccagcttaaataaagttgattgtgtgcataaaaatggtgaaaatattggactttcttggcaaaagaagaaaggagaagactttatattttctgacataatattcatcatttgtctttggtttgtgtattatgtgtatgattttgaaaaaatgcatcaaagatataactttctggtgtttgctttgatattatc

SEQ ID NO: 157 - protein, 1102 aa, Homo Sapiens
MNHQQQQQQQKAGEQQLSEPEDMEMEAGDTDDPPRITQNPVINGNVALSDGHNTAEEDMEDDTSWRSEATFQFTVERFSRLSESVLSPPCFVRNLPWKIMVMPRFYPDRPHQKSVGFFLQCNAESDSTSWSCHAQAVLKIINYRDDEKSFSRRISHLFFHKENDWGFSNFMAWSEVTDPEKGFIDDDKVTFEVFVQADAPHGVAWDSKKHTGYVGLKNQGATCYMNSLLQTLFFTNQLRKAVYMMPTEGDDSSKSVPLALQRVFYELQHSDKPVGTKKLTKSFGWETLDSFMQHDVQELCRVLLDNVENKMKGTCVEGTIPKLFRGKMVSYIQCKEVDYRSDRREDYYDIQLSIKGKKNIFESFVDYVAVEQLDGDNKYDAGEHGLQEAEKGVKFLTLPPVLHLQLMRFMYDPQTDQNIKINDRFEFPEQLPLDEFLQKTDPKDPANYILHAVLVHSGDNHGGHYVVYLNPKGDGKWCKFDDDVVSRCTKEEAIEHNYGGHDDDLSVRHCTNAYMLVYIRESKLSEVLQAVTDHDIPQQLVERLQEEKRIEAQKRKERQEAHLYMQVQIVAEDQFCGHQGNDMYDEEKVKYTVFKVLKNSSLAEFVQSLSQTMGFPQDQIRLWPMQARSNGTKRPAMLDNEADGNKTMIELSDNENPWTIFLETVDPELAASGATLPKFDKDHDVMLFLKMYDPKTRSLNYCGHIYTPISCKIRDLLPVMCDRAGFIQDTSLILYEEVKPNLTERIQDYDVSLDKALDELMDGDIIVFQKDDPENDNSELPTAKEYFRDLYHRVDVIFCDKTIPNDPGFVVTLSNRMNYFQVAKTVAQRLNTDPMLLQFFKSQGYRDGPGNPLRHNYEGTLRDLLQFFKPRQPKKLYYQQLKMKITDFENRRSFKCIWLNSQFREEEITLYPDKHGCVRDLLEECKKAVELGEKASGKLRLLEIVSYKIIGVHQEDELLECLSPATSRTFRIEEIPLDQVDIDKENEMLVTVAHFHKEVFGTFGIPFLLRIHQGEHFREVMKRIQSLLDIQEKEFEKFKFAIVMTGRHQYINEDEYEVNLKDFEPQPGNMSHPRPWLGLDHFNKAPKRSRYTYLEKAIKIHN

SEQ ID NO: 158 - DNA, 4022 bp, Homo Sapiens
gtacgtgcgcgtctccctgccgccgccgccgcccgccgcgggccgccccggggccgccgtcgccgacgacgcgcgggaggaggaggaggaggccgccccgccgccgccgccgccgccgccgccccggctcgccgccgcccgcccgccgggctcgcagccccggcccccggccgcaggcgaggcccaggccgcggccgacatgaaccaccagcagcagcagcagcagcagaaagcgggcgagcagcagttgagcgagcccgaggacatggagatggaagcgggagatacagatgacccaccaagaattactcagaaccctgtgatcaatgggaatgtggccctgagtgatggacacaacaccgcggaggaggacatggaggatgacaccagttggcgctccgaggcaacctttcagttcactgtggagcgcttcagcagactgagtgagtcggtccttagccctccgtgttttgtgcgaaatctgccatggaagattatggtgatgccacgcttttatccagacagaccacaccaaaaaagcgtaggattctttctccagtgcaatgctgaatctgattccacgtcatggtcttgccatgcacaagcagtgctgaagataataaattacagagatgatgaaaagtcgttcagtcgtcgtattagtcatttgttcttccataaagaaaatgattggggattttccaattttatggcctggagtgaagtgaccgatcctgagaaaggatttatagatgatgacaaagttacctttgaagtctttgtacaggcggatgctccccatggagttgcgtgggattcaaagaagcacacaggctacgtcggcttaaagaatcagggagcgacttgttacatgaacagcctgctacagacgttatttttcacgaatcagctacgaaaggctgtgtacatgatgccaaccgagggggatgattcgtctaaaagcgtccctttagcattacaaagagtgttctatgaattacagcatagtgataaacctgtaggaacaaaaaagttaacaaagtcatttgggtgggaaactttagatagcttcatgcaacatgatgttcaggagctttgtcgagtgttgctcgataatgtggaaaataagatgaaaggcacctgtgtagagggcaccatacccaaattattccgcggcaaaatggtgtcctatatccagtgtaaagaagtagactatcggtctgatagaagagaagattattatgatatccagctaagtatcaaaggaaagaaaaatatatttgaatcatttgtggattatgtggcagtagaacagctcgatggggacaataaatacgacgctggggaacatggcttacaggaagcagagaaaggtgtgaaattcctaacattgccaccagtgttacatctacaactgatgagatttatgtatgaccctcagacggaccaaaatatcaagatcaatgataggtttgaattcccagagcagttaccacttgatgaatttttgcaaaaaacagatcctaaggaccctgcaaattatattcttcatgcagtcctggttcatagtggagataatcatggtggacattatgtggtttatctaaaccccaaaggggatggcaaatggtgtaaatttgatgacgacgtggtgtcaaggtgtactaaagaggaagcaattgagcacaattatgggggtcacgatgacgacctgtctgttcgacactgcactaatgcttacatgttagtctacatcagggaatcaaaactgagtgaagttttacaggcggtcaccgaccatgatattcctcagcagttggtggagcgattacaagaagagaaaaggatcgaggctcagaagcggaaggagcggcaggaagcccatctctatatgcaagtgcagatagtcgcagaggaccagttttgtggccaccaagggaatgacatgtacgatgaagaaaaagtgaaatacactgtgttcaaagtattgaagaactcctcgcttgctgagtttgttcagagcctctctcagaccatgggatttccacaagatcaaattcgattgtggcccatgcaagcaaggagtaatggaacaaaacgaccagcaatgttagataatgaagccgacggcaataaaacaatgattgagctcagtgataatgaaaacccttggacaatattcctggaaacagttgatcccgagctggctgctagtggagcgaccttacccaagtttgataaagatcatgatgtaatgttatttttgaagatgtatgatcccaaaacgcggagcttgaattactgtgggcatatctacacaccaatatcctgtaaaatacgtgacttgctcccagttatgtgtgacagagcaggatttattcaagatactagccttatcctctatgaggaagttaaaccgaatttaacagagagaattcaggactatgacgtgtctcttgataaagcccttgatgaactaatggatggtgacatcatagtatttcagaaggatgaccctgaaaatgataacagtgaattacccaccgcaaaggagtatttccgagatctctaccaccgcgttgatgtcattttctgtgataaaacaatccctaatgatcctggatttgtggttacgttatcaaatagaatgaattattttcaggttgcaaagacagttgcacagaggctcaacacagatccaatgttgctgcagtttttcaagtctcaaggttatagggatggcccaggtaatcctcttagacataattatgaaggtactttaagagatcttctacagttcttcaagcctagacaacctaagaaactttactatcagcagcttaagatgaaaatcacagactttgagaacaggcgaagttttaaatgtatatggttaaacagccaatttagggaagaggaaataacactatatccagacaagcatgggtgtgtccgggacctgttagaagaatgtaaaaaggccgtggagcttggggagaaagcatcagggaaacttaggctgctagaaattgtaagctacaaaatcattggtgttcatcaagaagatgaactattagaatgtttatctcctgcaacgagccggacgtttcgaatagaggaaatccctttggaccaggtggacatagacaaagagaatgagatgcttgtcacagtggcgcatttccacaaagaggtcttcggaacgttcggaatcccgtttttgctgaggatacaccagggcgagcattttcgagaagtgatgaagcgaatccagagcctgctggacatccaggagaaggagtttgagaagtttaaatttgcaattgtaatgacgggccgacaccagtacataaatgaagacgagtatgaagtaaatttgaaagactttgagccacagcccggtaatatgtctcatcctcggccttggctagggctcgaccacttcaacaaagccccaaagaggagtcgctacacttaccttgaaaaggccattaaaatccataactgatttccaagctggtgtgttcaaggcgaggacggtgtgtgggtggccccttaacagcctagaactttggtgcacgtgccctctagccgaagtcttcagcaagaggattcgctgctggtgttaattttattttattgaggctgttcagtttggcttctctgtatctattgactgccctttttgagcaaaatgaagatgtttttataaagcttggatgccaatgagagttattttatggtaaccacagtgcaaggcaactgtcagcgcaatgggggagaagaggttagtggatcgggggtccctggctcaaggtctctgggctgtccctagtgggcacgagtggctcggctgccttcctggggtcccgtgcaccagccctgcagctagcaagtcttgtgtttaggctcgtctgacctatttccttcagttatactttcaatgaccttttgtgcatctgttaaggcaaaacagagaaactcacaacctaataaatagcgctcttcccttcaaaaaaaaa

SEQ ID NO: 159 - protein, 293 aa, Homo Sapiens
MATFSGPAGPILSLNPQEDVEFQKEVAQVRKRITQRKKQEQLTPGVVYVRHLPNLLDETQIFSYFSQFGTVTRFRLSRSKRTGNSKGYAFVEFESEDVAKIVAETMNNYLFGERLLECHFMPPEKVHKELFKDWNIPFKQPSYPSVKRYNRNRTLTQKLRMEERFKKKERLLRKKLAKKGIDYDFPSLILQKTESISKTNRQTSTKGQVLRKKKKKVSGTLDTPEKTVDSQGPTPVCTPTFLERRKSQVAELNDDDKDDEIVFKQPISCVKEEIQETQTPTHSRKKRRRSSNQ

SEQ ID NO: 160 - DNA, 1005 bp, Homo Sapiens
tgggagcccgacgtttccgggagcgccgcgtggttagcgtcggcggcttttggcatggcgactttttctggcccggctgggccaatcctgtcgcttaatccgcaggaagatgtcgagtttcaaaaggaggtggcgcaggttcgcaagcgcataacccagcgaaaaaaacaagaacaacttactcctggagtagtctatgtgcgccacctacctaacctacttgacgaaacccagatcttttcatatttctcccagtttggcactgtgacacggttcaggctgtccagaagtaaaaggactggaaatagcaaaggctatgcatttgtggagtttgagtctgaggatgttgccaaaatagttgctgaaacaatgaacaactacctgtttggtgaaagactcttggagtgtcattttatgccacctgaaaaagtacataaagaactctttaaagactggaatattccatttaagcagccatcatatccatcagtgaaacggtataatcggaatcggacactaacacaaaagctacggatggaggagcgatttaaaaagaaagaaagattactcaggaagaaattagctaaaaaaggaattgactatgattttccttctttgattttacagaaaacggaaagtatttcaaaaactaatcgtcagacgtctacaaaaggccaggttttacgtaagaagaagaaaaaagtttcaggtactcttgacactcctgagaagactgtggatagccagggccccacaccagtttgtacaccaacatttttggagaggcgaaaatctcaagtggctgaactgaatgatgatgataaagatgatgaaatagttttcaaacagcccatatcctgtgtaaaagaagaaatacaagagactcaaacacctacacattcacggaaaaaaagacgaagaagcagcaatcagtgattttcaatgtattatatttcttttgaaaaatataatatttttatgagaaaaaaaaaaaaaaaaaaaaaa

SEQ ID NO: 161 - skipped

SEQ ID NO: 162 - DNA, 2148 bp, Homo Sapiens
gtaaaaatgacttggattgaaaatatgtggtagcctttttatttctacattaagttctacctaggatatttccaaggactgccacaaaacccatatgtgcagtactttactactttgggaaagctgcatctttctaccacattttaacatctaatatatttaatttctttgaagagggttctgtgtacgttattgtagttcccagtttaatatagttctttgtatctcttaacaggttgaagttattgcaaaacactctggaaagtaataattacatcataatcatttattttttaaacttaaaagcctagaaatttcctagaaagaaaataggagacatctcagagcaatttggttttggtgtatatgttctcaacagaaaaccagtgttaatgaatatcatgcctcagcactgtcacttttaaaacctgtcaggatcccaccgtaaaattggaaatgggcagttctgaattttcacgtttgaaatgtaaaatataaacttcagtcaatatccaggtttattgtgtcctactatttaataatgagagaagtaatggcaaggcctttactttcaggaaaggatagaagtatagattaatgactggaaagttttaatatatttagcccaaaggttactttgaattgaagtctttgcattgactgtttgtgtttggtttatttgtttagctttacaaggtacacataagttaggttgaggggttgttaacccttccgtggtctgctttcattccgtgtgcttcctgtcacaggtaatggaaaacataagtagaataggtgacctcttagttttgaacttatttaagtgtggggatgaatttttcatcagaagtgcttacagggttactacctcagtttacaatctacctggtcattattttatttctatccagttctaagaactgcctccactgtttatatattcataattaaacacattgagaatgcaacactataaaagctggtcaaatttttgcagagcccttattctgtgtgttttttgtttttttcttttttttttgagacagagtctcgttcggtcccccagcttggagtgcagtggcgcgatctcggctcactgcaacctccgcctcctgggttcacgcgattctcctgcctcagcctcccgagtagctgggattacaggcacacaccaccacgcccggctaattttttgtgtctttttagtagagacggggtttcgctatgttggccagactggtcttgaactgctgacctcgtgatccgcccgcctcggcctctcaaagtgctgggattctgtgtgttttgtgcacctccactttaggtaatcatagggagcacatttacaggatggtctaataacatgaaaacaggctagtttcaagcaacagcaatgtcggttggaaagcaggcgtcatttgccttgaaaaaagccttttgacaacatacaggcattcttttaaaaccaggctgaaacattttatttccgagacttaacgttgtgtttcctgtttcttaaacctagcacctctgtgtatttgaaaataatgagacatctttcattggattttggaaaattgttccccatgggattctaacctcactaccaaatgagtgaaagcttgattaagagttcttccatatactagcctccttggaagaagtgatcagaaggtgataagaaggacagaaaggactattttaaagttggactgaaggagaaaaaagcaaaattcttgtttcatcccaattctagttagaacaaagttaaacccccgtaatcttaaagagaaaatctttggaggttttaattaaacattttatacatttaaagtcttgttaatggtgctttaagtgtcaatgtagcatgtaaaaggctttgtacagacaggtaaaagttccatttctgagtgatgaaatgtaacacttcttcatctttaacttgaaatcaaaactatcagattttatttttgtataatttaaggaaggtaaagttaggggactagaagactctaaattggcttctacagatcaataatttaaatgtaactagttgggattttatagttaaaattatatttgtgtatataacataattaatctgtaaattgtaataaatatatttgcaattattaaatgttaagtgat

SEQ ID NO: 163 - protein, 237 aa, Homo Sapiens
MARDPPNRVPPTTEGTRGLLSCLPDVERATLTLLLDHLRLVSSFHAYNRMTPQNLAVCFGPVLLPARQAPTRPRARSSGPGLASAVDFKHHIEVLHYLLQSWPDPRLPRQSPDVAPYLRPKRQPPLHLPLADPEVVTRPRGRGGPESPPSNRYAGDWSVCGRDFLPCGRDFLSGPDYDHVTGSDSEDEDEEVGEPRVTGDFEDDFDAPFNPHLNLKDFDALILDLERELSKQINVCL

SEQ ID NO: 164 - DNA, 1724 bp, Homo Sapiens
atggcccgggaccccccaaacagagttccccccaccactgagggcacccgagggctcctcagctgcctgccagatgtggaaagggccacgctgacgcttctcctggaccacctgcgcctcgtctcctccttccatgcctacaaccgcatgaccccacagaacttggccgtgtgcttcgggcctgtgctgctgccggcacgccaggcgcccacaaggcctcgtgcccgcagctccggcccaggccttgccagtgcagtggacttcaagcaccacatcgaggtgctgcactacctgctgcagtcttggccagatccccgcctgccccgacaatctccagatgtcgcgccttacttgcgacccaaacgacagccacctctgcacctgccgctggcagaccccgaagtggtgactcggccccgcggtcgaggaggccccgaaagccccccgagcaaccgctacgccggcgactggagcgtttgcgggcgggacttcctgccctgtgggcgggatttcctgtccgggccagactacgaccacgtgacgggcagtgacagcgaggacgaggacgaggaggtcggcgagccgagggtcaccggtgacttcgaagacgacttcgatgcgcccttcaacccgcacctgaatctcaaagacttcgacgccctcatcctggatctggagagagagctctccaagcaaatcaacgtgtgcctctgagccagatgacggggtgggaccccggttagtaaggaccgggcgcccagtggctaaggcggtgccctggtgaccaaggagagccagacctgttgctcaggccgagctcctggttgccagcgagttaccacgggaccagtcgcgtgtatggctgagactcattcccagtttccagggcccggtatttggacactagttgccaagtctggggcctggggattttagggaccagcggttgtgaccatctttcctgagcaccaagggcttccccttttgttgccaaaaaggtagttctcgcgcttgctaggctggcctctcttgcctccccttggccggggcaacaccagttactgtgagcatcaccctggtgtggtgagtcacctctagtcggccctcttgctgctgccaaccaaatcagtattagctttgagcactgcactgtttctccctcccttggacgacacaaagactagcatgaggcactctttgtggggggcagcccctatcctgggttccagcatggacacaggggtagcctggggcttatagagaaacagctggtttcccctaccctttcccggggaagaccccacgattggcctctagtcagcaaatggagataacagagtctggcctttccaatccccatctccttgccccccccttgccccccccccgaaaaaaattgagcacttaaacccctcccttttggagggggccccctgaagcgtcaggctgggggcagtctggtacggaacatatttattgcctccatgcatgtgtgtgtgtgtctgtgaggactggtgtgcgtggacacgtctgaagcaggcgtgtggggctctttcagggaccacagaggagggagcagtttgcagtgcccagccaccctgaaatccccaataatggtgcctcagtgggccccagagttccagtgggagagtacggttccctcctgtctccctcttcttttccgcacctccatctttgtggataataaataaatatgcacaggt

SEQ ID NO: 165 - skipped

SEQ ID NO: 166 - DNA, 424 bp, Homo Sapiens
ttttaggatggggtgtgggaatgagggtgtgtgtagggagggggtgcggggtggggacggaggggagcgtcctaagggtcgatttagtgtcatgcctctttcaccaccaccaccaccaccgaagatgacagcaaggatcggctaaataccgcgtgttctcatctagaagtgggaacttacagatgacagttcttgcatgggcagaacgagggggaccggggacgcggaagtctgcttgagggaggaggggtggaaggagagacagcttcaggaagaaaacaaaacacgaatactgtcggacacagcactgactacccgggtgatgaaatcatctgcacactgaacacccccgtcacaagtttacctatgtcacaatcttgcacatgtatgcttgaacgacaaataaaagttaggggggagaaga

SEQ ID NO: 167 - skipped

SEQ ID NO: 168 - DNA, 270 bp, Homo Sapiens
  misc_feature 144, 233, 248: n = A,T,C or G
tttttttttgtattgtatacacagtggaaagctggttttatttgggagacaatgggagcttttacattgttgagcaaaggagtgacgagatcagtcttgctttttagaaagattagtttggcagttacttatttgtaaccaganttagacagcaaatcgggatgcagggggagaagtcaggtgactattagtctgcgagtaattctgggacaagagcagtggtaatggaattnaaagggattaaagtntttaccaggttttggcataaat

SEQ ID NO: 169 - protein, 443 aa, Homo Sapiens
MDFPCLWLGLLLPLVAALDFNYHRQEGMEAFLKTVAQNYSSVTHLHSIGKSVKGRNLWVLVVGRFPKEHRIGIPEFKYVANMHGDETVGRELLLHLIDYLVTSDGKDPEITNLINSTRIHIMPSMNPDGFEAVKKPDCYYSIGRENYNQYDLNRNFPDAFEYNNVSRQPETVAVMKWLKTETFVLSANLHGGALVASYPFDNGVQATGALYSRSLTPDDDVFQYLAHTYASRNPNMKKGDECKNKMNFPNGVTNGYSWYPLQGGMQDYNYIWAQCFEITLELSCCKYPREEKLPSFWNNNKASLIEYIKQVHLGVKGQVFDQNGNPLPNVIVEVQDRKHICPYRTNKYGEYYLLLLPGSYIINVTVPGHDPHITKVIIPEKSQNFSALKKDILLPFQGQLDSIPVSNPSCPMIPLYRNLPDHSAATKPSLFLFLVSLLHIFFK

SEQ ID NO: 170 - DNA, 2085 bp, Homo Sapiens
gcatttcttccttctgcgtatgggacaggaccctttctggaatgggggtcttatgacctacaatcaaacaagaacatggacttcccgtgcctctggctagggctgttgctgcctttggtagctgcgctggatttcaactaccaccgccaggaagggatggaagcgtttttgaagactgttgcccaaaactacagttctgtcactcacttacacagtattgggaaatctgtgaaaggtagaaacctgtgggttcttgttgtggggcggtttccaaaggaacacagaattgggattccagagttcaaatacgtggcaaatatgcatggagatgagactgttgggcgggagctgctgctccatctgattgactatctcgtaaccagtgatggcaaagaccctgaaatcacaaatctgatcaatagtacccggatacacatcatgccttccatgaacccagatggatttgaagccgtcaaaaagcctgactgttactacagcatcggaagggaaaattataaccagtatgacttgaatcgaaatttccccgatgcttttgaatataataatgtctcaaggcagcctgaaactgtggcagtcatgaagtggctgaaaacagagacgtttgtcctctctgcaaacctccatggtggtgccctcgtggccagttacccatttgataatggtgttcaagcaactggggcattatactcccgaagcttaacgcctgatgatgatgtttttcaatatcttgcacatacctatgcttcaagaaatcccaacatgaagaaaggagacgagtgtaaaaacaaaatgaactttcctaatggtgttacaaatggatactcttggtatccactccaaggtggaatgcaagattacaactacatctgggcccagtgttttgaaattacgttggagctgtcatgctgtaaatatcctcgtgaggagaagcttccatccttttggaataataacaaagcctcattaattgaatatataaagcaggtgcacctaggtgtaaagggtcaagtttttgatcagaatggaaatccattacccaatgtaattgtggaagtccaagacagaaaacatatctgcccctatagaaccaacaaatatggagagtattatctccttctcttgcctgggtcttatattataaatgttacagtccctggacatgatccacacatcacaaaggtgattattccggagaaatcccagaacttcagtgctcttaaaaaggatattctacttccattccaagggcaattggattctatcccagtatcaaatccttcatgcccaatgattcctctatacagaaatttgccagaccactcagctgcaacaaagcctagtttgttcttatttttagtgagtcttttgcacatattcttcaaataaagtaaaatgtgaaactcaacccacatcaccacctggaatcagggattgctcactccaggttactgcaaccctaactcactctagtgggaccttgactggagaaactccacgatcttcctgaagaagagaaatggatgtttccaaattccacaataagcaatatgtggtgataatgaaaagaatgattcagtcttgacggtgaatggaagacacttacctaacaagtactgctcatttacactcaaattaatcttgaagtagtcttaaaatgtgtaagaagttaaaacttgagaagcaaaaaatgcctgcaaaaagaagatcattttgtatacagagaaccggatgaatataagcaatgaagatgaacatttattgatcttctacatacaagacttcaccataaggccaggagcagtgctcacgccttgtaatcccagcactttgggaggccaaggtgggcggatcaccttgaggtcaggagttcaagaccagcctgaccaacatggtgaaaccctgtctctactaaatattagcggggtgtggtggcgggcacctgtagtcgcagcctttcgggaggctgagacaggagaatcgcttgaaccctagaggcggagtttgcagtgagccgagatagtgccattgtactccagcttgggcaacagagtaagactctgtctc

SEQ ID NO: 171 - skipped

SEQ ID NO: 172 - DNA, 529 bp, Homo Sapiens
  misc_feature 529: n = A,T,C or G
aggtttgaggggggatgctgtcatgaaaaggaactttcgcttttcaggttatgtatgtatagttttctgaactggtatcacaaccacatgctgcttctgtgtaacactgatttggtcaaaaagccctgttcctcctgagaatcaccaaattgcttcccaaagatgctatatccttcacaccaaacttaaatcactggctactgagaatatgcagtctttgcgcacaattgcgtcttctgtctgcccctcccgcaggtcccagacacaatttcttcatggcttcttcagcctttccaccctcagcctctgtctccaaattgtaacccattttacatgaccacacagggacacatcatcattctttatggaagaaggtgagatagaaacaaataatgaggtgttgattgattgaatttcctgaatcctagaccttaggatcttgaaatggccccttttcctgctacgatagcccatccaatgccttccggctccaccggctcctctggagagctcaaactcatgaataacn

SEQ ID NO: 173 - skipped

SEQ ID NO: 174 - DNA, 245 bp, Homo Sapiens
taataaagtgctgaatatctgtcatttattgaattgaatactgtacattacatcaaaattgcaactgtttcacatcatcataaagtcaatatgtcatgacgttgcaccatcagaagttggggaccatctgtataagttatcaccttagttcatagactacgtaggtgtagcatgaaagagttaaacctccctccccacacatacacagggcacagggctgctgcgctgggtgggagggtgcactt

SEQ ID NO: 175 - skipped

SEQ ID NO: 176 - DNA, 398 bp, Homo Sapiens
  misc_feature 2, 3, 6, 118: n = A,T,C or G
anntanagtttgagggaaaggaggtaagaattgacacaaataagtaatgtcatgtgcctaaaatgactgaagattcagtaaagaccaaatggaaaaaaatctcatttttttaattccnctcatatttgatgtttgtgaaagtctgtattggtgcaggcactttgggtgtttctgtggccgcaagaggctcctgatcttgccctcagatgagtttttttttttgaaaaaaggagcacaatggagagcaagaaaaataaagggaaatacagcctttgtgaatgggaaggaactgtggtttcagttgcagaggtgggccaaatagttttggccttttttttgtcaggcagacacatgcacacgtatgtttattgcggtactattcacaatagcaaagactt

SEQ ID NO: 177 - skipped

SEQ ID NO: 178 - DNA, 425 bp, Homo Sapiens
  misc_feature 392, 415: n = A,T,C or G
aggatggggtgtgaccttaatctactgacaaagacaaaagaaaatttcaattatatgttgatagtccaccagaaggggccttggagggaaacagtataccccccagtaatgcaaaagaggtataatggtcctagaagtgatagggttgtggacaactgcaattattcacattaactgttcaaatgtaaagatcataaggagtgggcacccactattgaaaagaggtggggcatccttgtctagggcacaagaaccaacataaatgcaattatgcatgtcaacaagccaagaaaaggggacttagggggtcagcaaccctggtatactgcaaattggagggtgagaaggtaagaactttgtttaattaaggatgaaccctgtgggtgattacntacctttaatgtcccaggggacntttgttgtgg

SEQ ID NO: 179 - skipped

SEQ ID NO: 180 - DNA, 386 bp, Homo Sapiens
  misc_feature 219, 350: n = A,T,C or G
tttttttttggtttgagggggaatgctggagaaaacatcaacattgagttgacatttgttttgctgaagtatagctaccatccactatcatgaatttttgtttcattacaaatgatagaaaagccagattctcaaaataaagtataattctttgtattaaataaatgtttataaatgtttatgaagctcattacattatcttttttaaaaaagtaaaanttttagaacatatgacgcttttcataattaatgcttttgatatagatttgaggaaagagtctccagtttgcagttctgaaaatgtaattttcaaattaaatttcattggcatttgagggtgacaccttccnctataatttcattacccggattgtaaggtttccccc

SEQ ID NO: 181 - protein, 1148 aa, Homo Sapiens
MGQQPGKVLGDQRRPSLPALHFIKGAGKKESSRHGGPHCNVFVEQALQRPVASDFEPQGLSEAARWNSKENLLAGPSENDPNLFVALYDFVASGDNTLSITKGEKLRVLGYNHNGEWCEAQTKNGQGWVPSNYITPVNSLEKHSWYHGPVSRNAAEYPLSSGINGSFLVRESESSPSQRSISLRYEGRVYHYRINTASDGKLYVSSESRFNTLAELVHHHSTVADGLITTLHYPAPKRNKPTVYGVSPNYDKWEMERTDITMKHKLGGGQYGEVYEGVWKKYSLTVAVKTLKEDTMEVEEFLKEAAVMKEIKHPNLVQLLGVCTREPPFYIITEFMTYGNLLDYLRECNRQEVNAVVLLYMATQISSAMEYLEKKNFIHRDLAARNCLVGENHLVKVADFGLSRLMTGDTYTAHAGAKFPIKWTAPESLAYNKFSIKSDVWAFGVLLWEIATYGMSPYPGIDRSQVYELLEKDYRMKRPEGCPEKVYELMRACWQWNPSDRPSFAEIHQAFETMFQESSISDEVEKELGKQGVRGAVTTLLQAPELPTKTRTSRRAAEHRDTTDVPEMPHSKGQGESDPLDHEPAVSPLLPRKERGPPEGGLNEDERLLPKDKKTNLFSALIKKKKKTAPTPPKRSSSFREMDGQPERRGAGEEEGRDISNGALAFTPLDTADPAKSPKPSNGAGVPNGALRESGGSGFRSPHLWKKSSTLTSSRLATGEEEGGGSSSKRFLRSCSVSCVPHGAKDTEWRSVTLPRDLQSTGRQFDSSTFGGHKSEKPALPRKRAGENRSDQVTRGTVTPPPRLVKKNEEAADEVFKDIMESSPGSSPPNLTPKPLRRQVTVAPASGLPHKEEAWKGSALGTPAAAEPVTPTSKAGSGAPRGTSKGPAEESRVRRHKHSSESPGRDKGKLSKLKPAPPPPPAASAGKAGGKPSQRPGQEAAGEAVLGAKTKATSLVDAVNSDAAKPSQPAEGLKKPVLPATPKPHPAKPSGTPISPAPVPLSTLPSASSALAGDQPSSTAFIPLISTRVSLRKTRQPPERASGAITKGVVLDSTEALCLAISGNSEQMASHSAVLEAGKNLYTFCVSYVDSIQQMRNKFAFREAINKLENNLRELQICPASAGSGPAATQDFSKLLSSVKEISDIVQR

SEQ ID NO: 182 - DNA, 5434 bp, Homo Sapiens
atggggcagcagcctggaaaagtacttggggaccaaagaaggccaagcttgcctgccctgcattttatcaaaggagcagggaagaaggaatcatcgaggcatgggggtccacactgcaatgtttttgtggaacaagcccttcagcggccagtagcatctgactttgagcctcagggtctgagtgaagccgctcgttggaactccaaggaaaaccttctcgctggacccagtgaaaatgaccccaaccttttcgttgcactgtatgattttgtggccagtggagataacactctaagcataactaaaggtgaaaagctccgggtcttaggctataatcacaatggggaatggtgtgaagcccaaaccaaaaatggccaaggctgggtcccaagcaactacatcacgccagtcaacagtctggagaaacactcctggtaccatgggcctgtgtcccgcaatgccgctgagtatccgctgagcagcgggatcaatggcagcttcttggtgcgtgagagtgagagcagtcctagccagaggtccatctcgctgagatacgaagggagggtgtaccattacaggatcaacactgcttctgatggcaagctctacgtctcctccgagagccgcttcaacaccctggccgagttggttcatcatcattcaacggtggccgacgggctcatcaccacgctccattatccagccccaaagcgcaacaagcccactgtctatggtgtgtcccccaactacgacaagtgggagatggaacgcacggacatcaccatgaagcacaagctgggcgggggccagtacggggaggtgtacgagggcgtgtggaagaaatacagcctgacggtggccgtgaagaccttgaaggaggacaccatggaggtggaagagttcttgaaagaagctgcagtcatgaaagagatcaaacaccctaacctagtgcagctccttggggtctgcacccgggagcccccgttctatatcatcactgagttcatgacctacgggaacctcctggactacctgagggagtgcaaccggcaggaggtgaacgccgtggtgctgctgtacatggccactcagatctcgtcagccatggagtacctagagaagaaaaacttcatccacagagatcttgctgcccgaaactgcctggtaggggagaaccacttggtgaaggtagctgattttggcctgagcaggttgatgacaggggacacctacacagcccatgctggagccaagttccccatcaaatggactgcacccgagagcctggcctacaacaagttctccatcaagtccgacgtctgggcatttggagtattgctttgggaaattgctacctatggcatgtccccttacccgggaattgaccgttcccaggtgtatgagctgctagagaaggactaccgcatgaagcgcccagaaggctgcccagagaaggtctatgaactcatgcgagcatgttggcagtggaatccctctgaccggccctcctttgctgaaatccaccaagcctttgaaacaatgttccaggaatccagtatctcagacgaagtggaaaaggagctggggaaacaaggcgtccgtggggctgtgactaccttgctgcaggccccagagctgcccaccaagacgaggacctccaggagagctgcagagcacagagacaccactgacgtgcctgagatgcctcactccaagggccagggagagagcgatcctctggaccatgagcctgccgtgtctccattgctccctcgaaaagagcgaggtcccccggagggcggcctgaatgaagatgagcgccttctccccaaagacaaaaagaccaacttgttcagcgccttgatcaagaagaagaagaagacagccccaacccctcccaaacgcagcagctccttccgggagatggacggccagccggagcgcagaggggccggcgaggaagagggccgagacatcagcaacggggcactggctttcacccccttggacacagctgacccagccaagtccccaaagcccagcaatggggctggggtccccaatggagccctccgggagtccgggggctcaggcttccggtctccccacctgtggaagaagtccagcacgctgaccagcagccgcctagccaccggcgaggaggagggcggtggcagctccagcaagcgcttcctgcgctcttgctccgtctcctgcgttccccatggggccaaggacacggagtggaggtcagtcacgctgcctcgggacttgcagtccacgggaagacagtttgactcgtccacatttggagggcacaaaagtgagaagccggctctgcctcggaagagggcaggggagaacaggtctgaccaggtgacccgaggcacagtaacgcctccccccaggctggtgaaaaagaatgaggaagctgctgatgaggtcttcaaagacatcatggagtccagcccgggctccagcccgcccaacctgactccaaaacccctccggcggcaggtcaccgtggcccctgcctcgggcctcccccacaaggaagaagcctggaaaggcagtgccttagggacccctgctgcagctgagccagtgacccccaccagcaaagcaggctcaggtgcaccaaggggcaccagcaagggccccgccgaggagtccagagtgaggaggcacaagcactcctctgagtcgccagggagggacaaggggaaattgtccaagctcaaacctgccccgccgcccccaccagcagcctctgcagggaaggctggaggaaagccctcgcagaggcccggccaggaggctgccggggaggcagtcttgggcgcaaagacaaaagccacgagtctggttgatgctgtgaacagtgacgctgccaagcccagccagccggcagagggcctcaaaaagcccgtgctcccggccactccaaagccacaccccgccaagccgtcggggacccccatcagcccagcccccgttcccctttccacgttgccatcagcatcctcggccttggcaggggaccagccgtcttccactgccttcatccctctcatatcaacccgagtgtctcttcggaaaacccgccagcctccagagcgggccagcggcgccatcaccaagggcgtggtcttggacagcaccgaggcgctgtgcctcgccatctctgggaactccgagcagatggccagccacagcgcagtgctggaggccggcaaaaacctctacacgttctgcgtgagctatgtggattccatccagcaaatgaggaacaagtttgccttccgagaggccatcaacaaactggagaataatctccgggagcttcagatctgcccggcgtcagcaggcagtggtccggcggccactcaggacttcagcaagctcctcagttcggtgaaggaaatcagtgacatagtgcagaggtagcagcagtcaggggtcaggtgtcaggcccgtcggagctgcctgcagcacatgcgggctcgcccatacccatgacagtggctgagaagggactagtgagtcagcaccttggcccaggagctctgcgccaggcagagctgagggccctgtggagtccagctctactacctacgtttgcaccgcctgccctcccgcaccttcctcctccccgctccgtctctgtcctcgaattttatctgtggagttcctgctccgtggactgcagtcggcatgccaggacccgccagccccgctcccacctagtgccccagactgagctctccaggccaggtgggaacggctgatgtggactgtctttttcatttttttctctctggagcccctcctcccccggctgggcctccttcttccacttctccaagaatggaagcctgaactgaggccttgtgtgtcaggccctctgcctgcactccctggccttgcccgtcgtgtgctgaagacatgtttcaagaaccgccatttcgggaagggcatgcacgggccatgcacacggctggtcactctgccctctgctgctgcccggggtggggtgcactcgccatttcctcacgtgcaggacagctcttgatttgggtggaaaacagggtgctaaagccaaccagcctttgggtcctgggcaggtgggagctgaaaaggatcgaggcatggggcatgtcctttccatctgtccacatccccagagcccagctcttgctctcttgtgacgtgcactgtgaatcctggcaagaaagcttgagtctcaagggtggcaggtcactgtcactgccgacatccctcccccagcagaatggaggcaggggacaagggaggcagtggctagtggggtgaacagctggtgccaaatagccccagactgggcccaggcaggtctgcaagggcccagagtgaaccgtcctttcacacatctgggtgccctgaagggcccttcccctcccccactcctctaagacaaagtagattcttacaaggccctttcctttggaacaagacagccttcacttttctgagttcttgaagcatttcaaagccctgcctctgtgtagccgccctgagagagaatagagctgccactgggcacctcgcgacaggtgggaggaaagggcctgcgcagtcctggtcctggctgcactcttgaactgggcgaatgtcttatttaattaccgtgagtgacatagcctcatgttctgtgggggtcatcagggagggttaggaaaaccacaaacggagcccctgaaagcctcacgtatttcacagagcacgcctgccatcttctccccgaggctgccccaggccggagcccagataccggcgggctgtgactctgggcagggacccggggtctcctggaccttgacagagcagctaactccgagagcagtgggcaggtggccgcccctgaggcttcacgccggagaagccaccttcccgccccttcataccgcctcgtgccagcagcctcgcacaggccctagctttacgctcatcacctaaacttgtactttatttttctgatagaaatggtttcctctggatcgttttatgcggttcttacagcacatcacctctttccccccgacggctgtgacgcagcggagaggcactagtcaccgacagcggccttgaagacagagcaaagcccccacccaggtcccccgactgcctgtctccatgaggtactggtcccttccttttgttaacgtgatgtgccactatattttacacgtatctcttggtatgcatcttttatagacgctcttttctaagtggcgtgtgcatagcgtcctgccctgccctcgggggcctgtggtggctccccctctgcttctcggggtccagtgcattttgtttctgtatatgattctctgtggttttttttgaatccaaatctgtcctctgtagtattttttaaataaatcagtgtttacattag

SEQ ID NO: 183 - skipped

SEQ ID NO: 184 - DNA, 571 bp, Homo Sapiens
  misc_feature 436: n = A,T,C or G
gtagaaaaaaaggtctcactgtgctcaggctggtcttgagctcctgtctgggcaacttggctaaacctcatctgtacaaaaaatacgaaaactagctgggtgtggtggtgtgcatccgtggtcccagctactagagaggctgaggtgggaggattccttcaccccaggaggtcaaggctgcagtgagccatgatctcatcactgtactccagcttgggcaacagagtgagaccctgtctccaacaacaacaaacaaaaacaaaaaccaaagaatctaatctatctaggcaacttccagaccttaggtttgatccccactttgtcacttccctacatgtatgatgttggatctcaatttccaaacagtgacatgagtaccataacctttcaaaaagtatctatggtgtagcctactggggtgctggctattgttctnagtgctttgggacagattaagtaaaaccaagcaaaccaaagatctctggccctgtgggaattcatattcttggtgagggcccatttactttttccttctttttggattcatatatcccttttggttataattcag

SEQ ID NO: 185 - skipped

SEQ ID NO: 186 - DNA, 336 bp, Homo Sapiens
  misc_feature 180, 194, 201, 259, 296: n = A,T,C or G
aacttataacattttgggtttatatttaatatagtacttctcatcaggaggatgttactcagttaatataaagttttttttcaaaacattaaatctcttttccatgtcaatgtctatagttttttttttaacattaaatttttttccgcatttcagtattagatacactgaatacatttntctaaatgtttttnccctagnggataaaagttttcctttttacctggactctctggatatctaaatataatattaactngggggggacaacaaaacaaaaatctaatttaaaaggnctccctcaacgggttcgggggggccgggtggattataacc

SEQ ID NO: 187 - protein, 278 aa, Homo Sapiens
MEPQEERETQVAAWLKKIFGDHPIPQYEVNPRTTEILHHLSERNRVRDRDVYLVIEDLKQKASEYESEAKYLQDLLMESVNFSPANLSSTGSRYLNALVDSAVALETKDTSLASFIPAVNDLTSDLFRTKSKSEEIKIELEKLEKNLTATLVLEKCLQEDVKKAELHLSTERAKVDNRRQNMDFLKAKSEEFRFGIKAAEEQLSARGMDASLSHQSLVALSEKLARLKQQTIPLKKKLESYLDLMPNPSLAQVKIEEAKRELDSIEAELTRRVDMMEL

SEQ ID NO: 188 - DNA, 647 bp, Homo Sapiens
tagaataatgtctacaagaggatgtcaagaaagcagagttgcatctgtctacagaaagggccaaagttgataatcgtcgtcagaacatggactttctaaaagcaaagtcagaggaattcagatttggaatcaaggctgcagaggagcaactttcagccagaggcatggatgcttctctgtctcatcagtccttagtagcactatcagagaaactggcaagattaaagcaacagactatacctttgaagaaaaaattggagtcctatttagacttaatgccgaatccgtctcttgctcaagtgaaaattgaagaagcaaagcgagaactagatagcattgaagctgaacttacaagaagagtagacatgatggaactgtgacaaaagccaaataaacatccttttccctaacaaagtaaattgaataggactttacagagttctttttcctcttggcatttcctaataacaaaactttctgtgttcttagattacagaatatcataattgatagaatatggtttcttactgtgtgttgaatttttgtgcccaaatacatagttttcatattaaaaagccttttctcttaaaaaaaaaaaaaaaaaaaaaaaaaaaaaaaaaaaaaaaaaaaaaaaaaaaaaaaaaaaa

SEQ ID NO: 189 - skipped

SEQ ID NO: 190 - DNA, 415 bp, Homo Sapiens
tttttttaacaaaagaaaagataaagtttattcacatactaggaacccacaaagaaaatgactttatccataactaaagacagggatttacaagcctaccttaataagggtaaaggagcagggaggaaaaggcttctactggaagaacaaatgggtttatttaggaaagacaaatgtatttttaggagaacaaaccaggagacaagatggttcttcatcatgtttgtttgtggtcttcttcatcttcttcacagccgtgaaactcctccagaaagggggctagtggaagtctcactcccagaagtttctgcttttagtcagataagggagtattcagacaaagcctctttctgcatctgttgattctcaaatgtcttcaggtcataataatttttacgacacagtggtataattt

SEQ ID NO: 191 - skipped

SEQ ID NO: 192 - DNA, 367 bp, Homo Sapiens
  misc_feature 204, 205, 243, 249, 323, 357, 362: n = A,T,C or G
gagaaaatgtatttaataattattaaaaataaaaacagcaacctgaagatgtatatatagttgcactggtgattcttgaaataaagtctagaactggcagaggatgggacccgtcaatttaaaaagcactgcttctccagaacaccctcagaggggaagcgaggcaaacctgggaactagagcacccaaggcccacagggcctnntacccaagggagacagggacaacccctggggcagggcnttaaancacaggtgaaggaagcacacctttcaaagcagctgatgactcttgaaatcctgaggaaacacccctgctctctngaacttcaccaggggctctgcactttctttgggntgccntaccg

SEQ ID NO: 193 - skipped

SEQ ID NO: 194 - DNA, 352 bp, Homo Sapiens
  misc_feature 10, 74, 228, 253, 306: n = A,T,C or G
ggcattacanacctttttgcacataacaatgctttcagaacaactttctttatgactattctcaacagttaccnagtattccattgtgtggatatacataatttgtttaaccaatcccctatattttaatattacatttccaacttttcactatgataaagagctctgggatgaataatgaccttgattatttcttaaaataagcccctaaaagtagaattgctgggncaaagagtgtgtgagcatctacggnctcactcttcaaagctaccctctagacccttatcttgaagggcagtaggtcanggaacttttactatttaggggaaggctactatggggctttctcaag

SEQ ID NO: 195 - skipped

SEQ ID NO: 196 - DNA, 418 bp, Homo Sapiens
  misc_feature 414: n = A,T,C or G
gggtcaacagaagagactgcttactgtttattaagtacacattaaaacctaagtggtcatttaaataaaaataacaacgtattattaattttattacatatatgaacataaaatgtatgaaaacaactgcataaaattgggactggcaaaaaaggtatataattgtacagttcttacgcatgaagtagtatattacatctcttgaaaataactgtgtcacagcttgccaggagtaaagaataaaataaaaaagaaagaaagaaactgtggtaagtcaagatgtacctctgctacccctgacacagcaagaccaacccttcctcctccaatacatttatgatgatcccctttttacttaacgagttgtaaaaccctaaagtaaatccctccaaataacaagaaccaagagttatnatta

SEQ ID NO: 197 - skipped

SEQ ID NO: 198 - DNA, 516 bp, Homo Sapiens
  misc_feature 366, 384, 397, 412, 459, 491, 501, 511: n = A,T,C or G
tttttttttgtttctgttttgttttttcttttgcactgatatataccataccaacattgcaagatgcaaagtgtggaaactggagtttaaataaaattacaaggcaaaactaccccatcccaagtgcggttgctgtacatatctacagtacaatttttggaatgtattgccatttaagaacatagaaactttctacagacaatttcacatacagaatacgtacaccttttagaaaaaaaggcaaatatttatcttacagagagcattgtattttacatttgcctgcacgtttcttttttctgtttcttttctttctttctttttttacatactaggatttattaaagtgaccataaggtgcccgangcgggttttctaatgggnaagcagactgggnttcaccaacacaggngcaggattgggtgggacaggctttcggggacctttcttcccctgggncacacgggcagatccggtccccaagggcaggntgttcagccnggggcttttnctttt

SEQ ID NO: 199 - skipped

SEQ ID NO: 200 - DNA, 370 bp, Homo Sapiens
  misc_feature 195, 260: n = A,T,C or G
ttttacatactagatttattaaagtgaccataagtgccgaagcggttttctaatggaaagcagactggattcacaacacagaagcagaattggtggaacaggctttcgggaactttcttcccctggtcacacggcagatcggtccccaaggacaggtgctcagccaggacttttgctttaagaaggatttgtctngagaaaggactagagagaaatccagctcagatgtattgctcattcctcttcagaaggactgggtnggaatggagcaggggctagaggaatctggaagctaattcttttaggctttttccaacagagggaagcagagggacttctgggtcttgaagtttggagcttacggaggcga

SEQ ID NO: 201 - protein, 542 aa, Homo Sapiens [sequence omitted]

SEQ ID NO: 202 - DNA, 2419 bp, Homo Sapiens
cacgataaaggggacatgccgggagttgcagtaccctcaggaagaagtcattgtcatggacatggacccttttcttcactgtgtgatcccaaacttcatccaaagccaagacttcttagaagggcttcagaaggaactgatgaacttggacttccatgagaatctgatgatttgaagaagagaagagagcctcacatctccactttaaggaaaattctgtttgaagatttccggtcctggctttctgatatttctaaaattgacctggaatcaaccattgacatgtcctgtgctaaatatgaattcactgatgccctgctgtgccatgatgatgagctggaagggcgccggattgccttcatcctgtacctggttccttcctgggacaggagcatgggtggtaccctggacctgtacagcatagatgaacactttcagccgaagcagattgtcaagtctcttatcccttcgtggaacaaactggttttctttgaagtatctcctgtgtcctttcaccaggtgtctgaagtgctgtctgaagaaaagtcacgtttgtctataagtggctggtttcatggtccatcattgactcggcctcccaactactttgaaccccccatacctcggagccctcacatcccacaagatcatgagattttgtatgattggatcaaccctacttatctggacatggattaccaagttcaaattcaagaagagtttgaagaaagttctgaaattctcctgaaggagtttcttaagcctgagaaattcacgaaagtctgtgaggccttggagcatggacatgtggaatggagcagccgaggtccccctaacaaaaggttttatgagaaagctgaggagagtaagcttcctgagatattgaaggagtgcatgaagttatttcgctctgaggcactattcttgctgctctccaacttcacaggcctgaagcttcatttcttggccccttcggaagaagatgagatgaatgataaaaaagaggcagaaaccactgatatcactgaagaagggactagccatagtcctcctgagccagagaataatcagatggccatcagcaacaacagccaacagagcaatgagcagacagacccagagccagaggaaaatgaaacaaagaaagaatcaagtgttcccatgtgccaaggggaactgaggcattggaagaccggtcactacactttaattcatgaccatagcaaggctgaatttgccctagacttaattctgtactgtggctgtgaaggctgggagccagaatatggcggttttacttcttacattgccaaaggtgaagatgaagagctgctaacagtgaatccagaaagcaattctttggcattggtctacagagacagagagactctgaaatttgtcaagcatattaaccaccgaagcctggaacaaaagaaaaccttcccaaacagaacaggtttctgggacttttcattcatctattatgaatgacagcactgggcaaagctgaacaaaaatgtgacccttcgtaattactgggaagtctgaaagagctaagcatggagtcaaggagaactacatggtagcttgcctgacagtgttcttaaaactggttgtcttttactaggactcataatgattgtcctcaaccgagaccttgagcttgcagctacgtacttatctcttgattaaaaaaaaaaaaaagttggctttttttttttttaacatttagtcctttttccatattggcttcttcagtgaatttttaagttcaatttgtttttattgaggtaaaatatttataacataaaactgaccagcttacccatttttaaatatgcaattcagtggattaagtacattctcattgttgtccagccatcaccatcatccatctccagaagttttccatcttcccaaattctgtgcccattgaacaataactccccacctccccttcccctagcaacagccatactttttgtctctatcatcaacttcactactcatatttctcatgtaagtggaatcatacagtatttgtccttttgtgactggtttcacttagcataaagtctttaagatgcatccatgtttccagtgtttcggtttttttagaaaaactcatacgtgattgcagccgggcatggtggctcacgcctgtaatcccagcacttgggaggccaaggcaggcggatcacctgaggtcaggagttaaacaccagcctgacaaacatggagaaaccccatctctactaaaaatacaaaattagctgggcgtggtggcacatgcctgtaatcccagctactcaggaggctggggcaggagaattggttgaacccaggaggcggaggttgcagtgagccgagattgtgccactgcactccagcctgggcaacaagagtgaaactctgtctc

SEQ ID NO: 203 - skipped

SEQ ID NO: 204 - DNA, 542 bp, Homo Sapiens
gagtaggagtgcctccttgtctgcactgctggtatggggttaggccaggtaggacattccagaggggcttctgaaaaccaagagtccctggggaaagggaacagagtaaggcaggccttgttctcactgccctctaagggaacttggtcactcggcacttttaagcctcagtttctccagttcaataataaggacaagagcttttcccatgcattctctttccccgggaaagttgactgaggtgaccagtaatagaattgaaaagggagagtgtcttcagtgcaatgtggcatcctggattgggtcttggaacaaaaacaggacattagtgggaaaattggaaatctgaaaaaagtctgaattttagttaatataccaatttcagtctcttggttttgacagatgtaccatggtgatgtaagatgttgaccttggggtaggctgggtgaagggtatacaggaactctttgtactatctctgcaacttctctgtaaatctagtatcattccaaaataaaagtttatttaatttaaaaaaaaaa

SEQ ID NO: 205 - protein, 212 aa, Homo Sapiens [sequence omitted]

SEQ ID NO: 206 - DNA, 2204 bp, Homo Sapiens
gaaaacattttgctgaaaatataagcaaacatcggccttgtcctccttgtgttcatacactgtggaagcttttctctgcctcctccgtgagagtgcgtggccgggagaccagaaacgtggtcctttctcttgcctgtgagctggtgcagagatggaggaagaagaatatgaacaaattccccaggagaatcccccagaagagctgtcccaggatcctgtgctggagctgtcaggaggtctcgccagaggtggcagacgctatctgccaagccatcgtcttatccgccccagggccccacgccgtgctcctggtgacacaactgggccggttcacggatgaggatcagcaggtggtcaggcgcctgcaggaggtctttggagtgggggttctgggtcacaccatcctggtgttcacccggaaggaagacctggctggcagctccctggaagactatgtgcgagagaccaacaaccaggcccttgcctggctggatgtgacccttgcacggcgccattgcggcttcaacaacagggcacagggggaggagcaggaggcccaactgcgagagctcatggagaaagttgaagccattatgtgggaaaacgaaggagattattacagcaacaaggcttaccaatatacccagcaaaactttcggctgaaagaactacaggaaaggcaagtaagccagggccaaggctctgaggacgtgcctggtgaggagtcttggctggaaggactgtcccagatccagaaggaatctgaggaagcccacagatgcctgctggggaaggctgacctttgagcctgtgctggacttgagccaaggacaccatcagcctttgcacccccctgtgtccagccctctgtttctctttccatcccatggagtgcttcccagtctccaggtcatgacgtctggtgtaggaagaggggcatggggcttgaggacagggtccagcatgcccagatcacattccagttccttcattccttcttccagaacatctgggtcctccctcctctgtgccccaacagcacgctgtcttcctattggaccttctatctcattggcattgcctttcatgagttacttgtctatactctgatagaaccaaagtttcttgagggcaggcctgtatcttttacttctgtgtaacttccacagcttttgactgcattggagtcatgcagtcacgtttggtgcggcaactccatgcaagctgttgaccagatgacttctcatctctccccacaccatgatggtttaaggtgcctgttgtgtctggtggagacagtgctgggagatgatcagaaatctcagggcacagcctcaggtctacctggacactcatccactgttggagatgctcaacagctagacacagatgctcacagccgacctgtggcctcttgctctgaagccatcccccatcttccctagacacagcagacatctgagaaagcttcagcatttctcttgctaacagattcagaaaagtgtctcaaagcagagcacagagttatttggtgtttgctgaagacagcctttgtgccacaatcacttattaaataagcgatcaatttcccattgaactgaacatgcaacatttatcatacattcagctctcattcacactccttaagatttggtcagaatttttatttctgttcatgtcttctacttttctactcctgtatgaataaaatattgatttgattacagtggctttgactataatgtgggagccaatttttgcctcagtcttcatttttatatttaccttgttattctcaggcatttttttcttctatgtgagagttaaaatcattctgtaatttccccccaaaatcatattggtattctagttggcaatgtcttacatttatgttaagtttgagggaattggtagttcaagtataagttaattaaggccattttatttctaagtgaacagacttgaaactccagagctactgaagtaaaagttagaatcatttgcattttcattcagataggagataattttgtaaattttgatgctattattttaactctattagcttaagtaatgtcataatagaaaacacaagcatttgaccaaatgagatccattcagcgactaactggcaaggcactcaaaacatgtcattcattaaatgttgtttttatttacctcaaaaaaaaaaaaaaaaaaaaaaa

SEQ ID NO: 207 - protein, 87 aa, Homo Sapiens
MVVIDVKMLSGFTPTMSSIEELENKGQVMKTEVKNDHVLFYLENVFGRADSFTFSVEQSNLVFNIQPAPGMVYDYYEKDGEAFLLTN

SEQ ID NO: 208 - DNA, 1955 bp, Homo Sapiens
ggcacgaggccgccttggggtgtgtgcctgccccgctgcgatggaggtcctaagagcaagggggggaagaggggctggctctggtagattgcaaatgacctgctttttttctgatcccgagctgcgttcggacccctgtcggatagtaaatcccagtaaggtacctgccgtgggcagatctgagctttcttcttggacaccccatacccacagtcctccaggccacccttaagtacaatgttctcctacctaagaaggcatctggattttctctttccttggaaatagtaaagaactactctttgactgtttttgacctcacagtgaacctcaaatacactggaattcgcaataaatccagtatggtggttatagatgtaaaaatgctatcaggatttactccaaccatgtcatccattgaagagcttgaaaacaagggccaagtgatgaagactgaagtcaagaatgaccatgttcttttctacttggaaaatgtttttggtcgagcagacagtttcactttttctgttgagcagagcaaccttgtgttcaacattcagccagccccaggcatggtctacgattactacgaaaaagatggagaagcatttcttttaacaaactgattcttctgtatcaaacctggaaaaaaatcatgaaccatctgacatcgtgaacagtctgcagtgggctatggtttcttgacaagtcttatttccttatcatcccattaaatgttgtcattttgcaaaaaaaaaaaaaaaaaaaaaaaaaaactcgagactagttctctctctcataaaattaattaaccgctcattcatcgacctccccaccccatccaacatctccgcatgatgaaacttcggctcactccttggcgcctgcctgatcctccaaatcaccacaggactattcctagccatgcactactcaccagacgcctcaaccgccttttcatcaatcgcccacatcactcgagacgtaaattatggctgaatcatccgctaccttcacgccaatggcgcctcaatattctttatctgcctcttcctacacatcgggcgaggcctatattacggatcatttctctactcagaaacctgaaacatcggcattatcctcctgcttgcaactatagcaacagccttcataggctatgtcctcccgtgaggccaaatatcattctgaggggccacagtaattacaaacttactatccgccatcccatacattggggcagacctagttcaatgaatctgaggaggctactcagtagacagtcccaccctcacacgattctttacctttcacttcatcttgcccttcattattgcagccctagcagcactccacctcctattcttgcacgaaacgggatcaaacaaccccctaggaatcacctcccattccgataaaatcaccttccacccttactacacaatcaaagacgccctcggcttacttctcttccttctctccttaatgacattaacactattctcaccagacctcctaggcgacccagacaattataccctagccaaccccttaaacacccctccccacatcaagcccgaatgatatttcctattcgcctacacaattctccgatccgtccctaacaaactaggaggcgtccttgccctattactatccatcctcatcctagcaataatccccatcctccatatatccaaacaacaaagcataatatttcgcccactaagccaatcactttattgactcctagccgcagacctcctcattctaacctgaatcggaggacaaccagtaagctacccttttaccatcattggacaagtagcatccgtactatacttcacaacaatcctaatcctaataccaactatctccctaattgaaaacaaaatactcaaatgggcctaaaaaaaaaaaaaaaaaaaaaaaaaaaaaaaaaaaaaaaaaaaaaa

SEQ ID NO: 209 - protein, 135 aa, Homo Sapiens
MATVQQLEGRWRLVDSKGFDEYMKELGVGIALRKMGAMAKPDCIITCDGKNLTIKTESTLKTTQFSCTLGEKFEETTADGRKTQTVCNFTDGALVQHQEWDGKESTITRKLKDGKLVVECVMNNVTCTRIYEKVE

SEQ ID NO: 210 - DNA, 662 bp, Homo Sapiens
accgccgacgcagacccctctctgcacgccagcccgcccgcacccaccatggccacagttcagcagctggaaggaagatggcgcctggtggacagcaaaggctttgatgaatacatgaaggagctaggagtgggaatagctttgcgaaaaatgggcgcaatggccaagccagattgtatcatcacttgtgatggtaaaaacctcaccataaaaactgagagcactttgaaaacaacacagttttcttgtaccctgggagagaagtttgaagaaaccacagctgatggcagaaaaactcagactgtctgcaactttacagatggtgcattggttcagcatcaggagtgggatgggaaggaaagcacaataacaagaaaattgaaagatgggaaattagtggtggagtgtgtcatgaacaatgtcacctgtactcggatctatgaaaaagtagaataaaaattccatcatcactttggacaggagttaattaagagaatgaccaagctcagttcaatgagcaaatctccatactgtttctttcttttttttttcattactgtgttcaattatctttatcataaacattttacatgcagctatttcaaagtgtgttggattaattaggatcatccctttggttaataaataaatgtgtttgtgct

SEQ ID NO: 211 - skipped

SEQ ID NO: 212 - DNA, 2396 bp, Homo Sapiens
gagagaactagtctcgagttttttttttttttttttgtgtaagggcgcagactgctgcgaacagagtggtgatagcgcctaagcatagtgttagagtttggattagtgggctattttctgctagggggtggaagcggatgagtaagaagattcctgctacaactatagtgcttgagtggagtagggctgagactggggtggggccttctatggctgaggggagtcaggggtggagacctaattgggctgatttgcctgctgctgctaggaggaggcctagtagtggggtgaggcttggattagcgtttagaagggctatttgttgtgggtctcatgagttggagtgtaggataaatcatgctaaggcgaggatgaaaccgatatcgccgatacggttgtataggattgcttgaatggctgctgtgttggcatctgctcgggcgtatcatcaactgatgagcaagaaggatataattcctacgccctctcagccgatgaacagttggaataggttgttagcggtaactaagattagtatggtaattaggaagatgagtagatatttgaagaactgattaatgtttgggtctgagtttatatatcacagtgagaattctatgatggaccatgtaacgaacaatgccacagggatgaatattatggagaagtagtctagtttgaagcttagggagagctgggttgtttgggttgtggctcagtgtcagttcgagataataacttcttggtctaggcacatgaatattgttgtggggaagagactgataataaaggtggatgcgacaatggattttacataatgggggtatgagttttttttgttagggttaacgagggtggtaaggatggggggaattagggaagtcagggttagggtggttacccactccaccttactaccagacaaccttagccaaaccatttacccaaataaagtataggcgatagaaattgaaacctggcgcaatagatatagtaccgcaagggaaagatgaaaaattataaccaagcataatatagcaaggactaacccctataccttctgcataatgaattaactagaaataactttgcaaggagagccaaagctaagacccccgaaaccagacgagctacctaagaacagctaaaagagcacacccgtctatgtagcaaaatagtgggaagatttataggtagaggcgacaaacctaccgagcctggtgatagctggttgtccaagatagaatcttagttcaactttaaatttgcccacagaaccctctaaatccccttgtaaatttaactgttagtccaaagaggaacagctctttggacactaggaaaaaaccttgtagagagagtaaaaaatttaacacccatagtaggcctaaaagcagccaccaattaagaaagcgttcaagctcaacacccactacctaaaaaatcccaaacatataactgaactcctcacacccaattggaccaatctatcaccctatagaagaactaatgttagtataagtaacatgaaaacattctcctccgcataagcctgcgtcagattaaaacactgaactgacaattaacagcccaatatctacaatcaaccaacaagtcattattaccctcactgtcaacccaacacaggcatgctcataaggaaaggttaaaaaaagtaaaaggaactcggcaaatcttaccccgcctgtttaccaaaaacatcacctctagcatcaccagtattagaggcaccgcctgcccagtgacacatgtttaacggccgcggtaccctaaccgtgcaaaggtagcataatcacttgttccttaaatagggacctgtatgaatggctccacgagggttcagctgtctcttacttttaaccagtgaaattgacctgcccgtgaagaggcgggcatgacacagcaagacgagaagaccctatggagctttaatttattaatgcaaacagtacctaacaaacccacaggtcctaaactaccaaacctgcattaaaaatttcggttggggcgacctcggagcagaacccaacctccgagcagtacatgctaagacttcaccagtcaaagcgaactactatactcaattgatccaataacttgaccaacggaacaagttaccctagggataacagcgcaatcctattctagagtccatatcaacaatagggtttacgacctcgatgttggatcaggacatcccaatggtgcagccgctattaaaggttcgtttgttcaacgattaaagtcctacgtgatctgagttcagaccggagtaatccaggtcggtttctatctacttcaaattcctccctgtacgaaaggacaagagaaataaaaaaaaaaaaaaaaaaaaaaaaaaaaaaaaaaaaaaaaaa

SEQ ID NO: 213 - skipped

SEQ ID NO: 214 - DNA, 575 bp, Homo Sapiens
gagagaactagtctcgagttttttttttttttttttgtgtaagggcgcagactgctgcgaacagagtggtgatagcgcctaagcatagtgttagagtttggattagtgggctattttctgctagggggtggaagcggatgagtaagaagtgtttttggtgtggtgtgattatgtgattgttaatgatttattcactatatcttacattaagacctatggtgtccttttaacctaatgtgtcctttgaagtcaagcaaaaccgtaagaatggttaaaaaattaacagctttggttcaattgccttataaacacataatataggtattactgatcgaaggaaagttcagtgaagatgctggtagtttacagcactccggagaattaaaacaatgagatgtaaaggtaacagctctaaaaattcagacatttgccttattaagctcttttctacaagagacttcattacattgaaaaatgaaacctggcacccatcctaggagaattatctgtgcagaagttctgatttacagatttgtgatcttagggaacagtgtgcacacccagggtgaaatttc

SEQ ID NO: 215 - skipped

SEQ ID NO: 216 - DNA, 320 bp, Homo Sapiens
gaacaccccgctcatctgagaaagggcagcattgctccctcagcaaatcagggggagagggagctttcccaggcttttaatcactctctgattcagcgcccaaaaacccagggacaggaagcccagcagattttgctcagaactgagataatatattttctaaccagaaaacacatctcagctagttaccacctcattcatctttccagagtggttataattacagtattcatttcataattgctgcctatttgcaaatacaaaatccctgaatcttaaaataaattacagttctcttttctatttaacagccattgtgc

SEQ ID NO: 217 - protein, 219 aa, Homo Sapiens
MSSHLVEPPPPLHNNNNNCEENEQSLPPPAGLNSSWVELPMNSSNGNDNGNGKNGGLEHVPSSSSIHNGDMEKILLDAQHESGQSSSRGSSHCDSPSPQEDGQIMFDVEMHTSRDHSSQSEEEVVEGEKEVEALKKSADWVSDWSSRPENIPPKEFHFRHPKRSVSLSMRKSGAMKKGGIFSAEFLKVFIPSLFLSHVLALGLGIYIGKRLSTPSASTY

SEQ ID NO: 218 - DNA, 1337 bp, Homo Sapiens
gcggcggactcggcttgttgtgttgctgcctgagtgccggagacggtcctgctgctgccgcagtcctgccagctgtccgacgatgtcgtcccacctagtcgagccgccgccgcccctgcacaacaacaacaacaactgcgaggaaaatgagcagtctctgcccccgccggccggcctcaacagttcctgggtggagctacccatgaacagcagcaatggcaatgataatggcaatgggaaaaatggggggctggaacacgtaccatcctcatcctccatccacaatggagacatggagaagattcttttggatgcacaacatgaatcaggacagagtagttccagaggcagttctcactgtgacagcccttcgccacaagaagatgggcagatcatgtttgatgtggaaatgcacaccagcagggaccatagctctcagtcagaagaagaagttgtagaaggagagaaggaagtcgaggctttgaagaaaagtgcggactgggtatcagactggtccagtagacccgaaaacattccacccaaggagttccacttcagacaccctaaacgttctgtgtctttaagcatgaggaaaagtggagccatgaagaaagggggtattttctccgcagaatttctgaaggtgttcattccatctctcttcctttctcatgttttggctttggggctaggcatctatattggaaagcgactgagcacaccctctgccagcacctactgagggaaaggaaaagcccctggaaatgcgtgtgacctgtgaagtggtgtattgtcacagtagcttatttgaacttgagaccattgtaagcatgacccaacctaccaccctgtttttacatatccaattccagtaaccctcaaattcaatattttattcaaactctgttgaggcattttactaaccttataccctttttggcctgaagacattttagaatttcctaacagagtttactgttgtttagaaatttgcaagggcttcttttccgcaaatgccaccagcagattataattttgtcggcaatgctattatctctaattagtgccaccagactagacctgtatcattcatggtataaattttactcttccaacataactaccatctctctcttaaaacgagatcaggttagcaaatgatgtaaaagaagctttattgtctagttgttttttttcccccaagacaaaggcaagtttccctaagtttgagttgatagttattaaaaagaaaacaaaacaaaaaaaaaaggcaaggcacaacaaaaaaatatcctgggcaataaaaaaaatattttaaaccaaaaaaaaaaaaaaaa

SEQ ID NO: 219 - protein, 492 aa, Homo Sapiens
MEPSSKKLTGRLMLAVGGAVLGSLQFGYNTGVINAPQKVIEEFYNQTWVHRYGESILPTTLTTLWSLSVAIFSVGGMIGSFSVGLFVNRFGRRNSMLMMNLLAFVSAVLMGFSKLGKSFEMLILGRFIIGVYCGLTTGFVPMYVGEVSPTAFRGALGTLHQLGIVVGILIAQVFGLDSIMGNKDLWPLLLSIIFIPALLQCIVLPFCPESPRFLLINRNEENRAKSVLKKLRGTADVTHDLQEMKEESRQMMREKKVTILELFRSPAYRQPILIAVVLQLSQQLSGINAVFYYSTSIFEKAGVQQPVYATIGSGIVNTAFTVVSLFVVERAGRRTLHLIGLAGMAGCAILMTIALALLEQLPWMSYLSIVAIFGFVAFFEVGPGPIPWFIVAELFSQGPRPAAIAVAGFSNWTSNFIVGMCFQYVEQLCGPYVFIIFTVLLVLFFIFTYFKVPETKGRTFDEIASGFRQGGASQSDKTPEELFHPLGADSQV

SEQ ID NO: 220 - DNA, 2856 bp, Homo Sapiens
tagtcgcgggtccccgagtgagcacgccagggagcaggagaccaaacgacgggggtcggagtcagagtcgcagtgggagtccccggaccggagcacgagcctgagcgggagagcgccgctcgcacgcccgtcgccacccgcgtacccggcgcagccagagccaccagcgcagcgctgccatggagcccagcagcaagaagctgacgggtcgcctcatgctggctgtgggaggagcagtgcttggctccctgcagtttggctacaacactggagtcatcaatgccccccagaaggtgatcgaggagttctacaaccagacatgggtccaccgctatggggagagcatcctgcccaccacgctcaccacgctctggtccctctcagtggccatcttttctgttgggggcatgattggctccttctctgtgggccttttcgttaaccgctttggccggcggaattcaatgctgatgatgaacctgctggccttcgtgtccgccgtgctcatgggcttctcgaaactgggcaagtcctttgagatgctgatcctgggccgcttcatcatcggtgtgtactgcggcctgaccacaggcttcgtgcccatgtatgtgggtgaagtgtcacccacagcctttcgtggggccctgggcaccctgcaccagctgggcatcgtcgtcggcatcctcatcgcccaggtgttcggcctggactccatcatgggcaacaaggacctgtggcccctgctgctgagcatcatcttcatcccggccctgctgcagtgcatcgtgctgcccttctgccccgagagtccccgcttcctgctcatcaaccgcaacgaggagaaccgggccaagagtgtgctaaagaagctgcgcgggacagctgacgtgacccatgacctgcaggagatgaaggaagagagtcggcagatgatgcgggagaagaaggtcaccatcctggagctgttccgctcccccgcctaccgccagcccatcctcatcgctgtggtgctgcagctgtcccagcagctgtctggcatcaacgctgtcttctattactccacgagcatcttcgagaaggcgggggtgcagcagcctgtgtatgccaccattggctccggtatcgtcaacacggccttcactgtcgtgtcgctgtttgtggtggagcgagcaggccggcggaccctgcacctcataggcctcgctggcatggcgggttgtgccatactcatgaccatcgcgctagcactgctggagcagctaccctggatgtcctatctgagcatcgtggccatctttggctttgtggccttctttgaagtgggtcctggccccatcccatggttcatcgtggctgaactcttcagccagggtccacgtccagctgccattgccgttgcaggcttctccaactggacctcaaatttcattgtgggcatgtgcttccagtatgtggagcaactgtgtggtccctacgtcttcatcatcttcactgtgctcctggttctgttcttcatcttcacctacttcaaagttcctgagactaaaggccggaccttcgatgagatcgcttccggcttccggcaggggggagccagccaaagtgataagacacccgaggagctgttccatcccctgggggctgattcccaagtgtgagtcgccccagatcaccagcccggcctgctcccagcagccctaaggatctctcaggagcacaggcagctggatgagacttccaaacctgacagatgtcagccgagccgggcctggggctcctttctccagccagcaatgatgtccagaagaatattcaggacttaacggctccaggattttaacaaaagcaagactgttgctcaaatctattcagacaagcaacaggttttataatttttttattactgattttgttatttttatatcagcctgagtctcctgtgcccacatcccaggcttcaccctgaatggttccatgcctgagggtggagactaagccctgtcgagacacttgccttcttcacccagctaatctgtagggctggacctatgtcctaaggacacactaatcgaactatgaactacaaagcttctatcccaggaggtggctatggccacccgttctgctggcctggatctccccactctaggggtcaggctccattaggatttgccccttcccatctcttcctacccaaccactcaaattaatctttctttacctgagaccagttgggagcactggagtgcagggaggagaggggaagggccagtctgggctgccgggttctagtctcctttgcactgagggccacactattaccatgagaagagggcctgtgggagcctgcaaactcactgctcaagaagacatggagactcctgccctgttgtgtatagatgcaagatatttatatatatttttggttgtcaatattaaatacagacactaagttatagtatatctggacaagccaacttgtaaatacaccacctcactcctgttacttacctaaacagatataaatggctggtttttagaaacatggttttgaaatgcttgtggattgagggtaggaggtttggatgggagtgagacagaagtaagtggggttgcaaccactgcaacggcttagacttcgactcaggatccagtcccttacacgtacctctcatcagtgtcctcttgctcaaaaatctgtttgatccctgttacccagagaatatatacattctttatcttgacattcaaggcatttctatcacatatttgatagttggtgttcaaaaaaacactagttttgtgccagccgtgatgctcaggcttgaaatcgcattattttgaatgtgaagggaa

SEQ ID NO: 221 - protein, 226 aa, Homo Sapiens
MFIMGLGDPIPEELYEMLSDHSIRSFDDLQRLLHGDPGEEDGAELDLNMTRSHSGGELESLARGRRSLGSLTIAEPAMIAECKTRTEVFEISRRLIDRTNANFLVWPPCVEVQRCSGCCNNRNVQCRPTQVQLRPVQVRKIEIVRKKPIFKKATVTLEDHLACKCETVAAARPVTRSPGGSQEQRAKTPQTRVTIRTVRVRRPPKGKHRKFKHTHDKTALKETLGA

SEQ ID NO: 222 - DNA, 2378 bp, Homo Sapiens
gtgtgtgtgtgtgtgcgcgcgcatctgagagagagagagagagagagagactgactgagcaggaatggtgagatgtttatcatgggcctcggggaccccattcccgaggagctttatgagatgctgagtgaccactcgatccgctcctttgatgatctccaacgcctgctgcacggagaccccggagaggaagatggggccgagttggacctgaacatgacccgctcccactctggaggcgagctggagagcttggctcgtggaagaaggagcctgggttccctgaccattgctgagccggccatgatcgccgagtgcaagacgcgcaccgaggtgttcgagatctcccggcgcctcatagaccgcaccaacgccaacttcctggtgtggccgccctgtgtggaggtgcagcgctgctccggctgctgcaacaaccgcaacgtgcagtgccgccccacccaggtgcagctgcgacctgtccaggtgagaaagatcgagattgtgcggaagaagccaatctttaagaaggccacggtgacgctggaagaccacctggcatgcaagtgtgagacagtggcagctgcacggcctgtgacccgaagcccggggggttcccaggagcagcgagccaaaacgccccaaactcgggtgaccattcggacggtgcgagtccgccggccccccaagggcaagcaccggaaattcaagcacacgcatgacaagacggcactgaaggagacccttggagcctaggggcatcggcaggagagtgtgtgggcagggttatttaatatggtatttgctgtattgcccccatggggtccttggagtgataatattgtttccctcgtccgtctgtctcgatgcctgattcggacggccaatggtgcttcccccacccctccacgtgtccgtccacccttccatcagcgggtctcctcccagcggcctccggtcttgcccagcagctcaaagaagaaaaagaaggactgaactccatcgccatcttcttcccttaactccaagaacttgggataagagtgtgagagagactgatggggtcgctctttgggggaaacgggttccttcccctgcacctggcctgggccacacctgagcgctgtggactgtcctgaggagccctgaggacctctcagcatagcctgcctgatccctgaacccctggccagctctgaggggaggcacctccaggcaggccaggctgcctcggactccatggctaagaccacagacgggcacacagactggagaaaacccctcccacggtgcccaaacaccagtcacctcgtctccctggtgcctctgtgcacagtggcttcttttcgttttcgttttgaagacgtggactcctcttggtgggtgtggccagcacaccaagtggctgggtgccctctcaggtgggttagagatggagtttgctgttgaggtggtgtagatggtgacctgggtatcccctgcctcctgccaccccttcctccccatactccactctgattcacctcttcctctggttcctttcatctctctacctccaccctgcattttcctcttgtcctggcccttcagtctgctccaccaaggggctcttgaaccccttattaaggccccagatgaccccagtcactcctctctagggcagaagactagaggccagggcagcaagggacctgctcatcatattccaacccagccacgactgccatgtaaggttgtgcagggtgtgtactgcacaaggacattgtatgcagggagcactgttcacatcatagataaagctgatttgtatatttattatgacaatttctggcagatgtaggtaaagaggaaaaggatccttttcctaattcacacaaagactccttgtggactggctgtgcccctgatgcagcctgtggctggagtggccaaataggagggagactgtggtaggggcagggaggcaacactgctgtccacatgacctccatttcccaaagtcctctgctccagcaactgcccttccaggtgggtgtgggacacctgggagaaggtctccaagggagggtgcagccctcttgcccgcacccctccctgcttgcacacttccccatctttgatccttctgagctccacctctggtggctcctcctaggaaaccagctcgtgggctgggaatgggggagagaagggaaaagatccccaagaccccctggggtgggatctgagctcccacctcccttcccacctactgcactttcccccttcccgccttccaaaacctgcttccttcagtttgtaaagtcggtgattatatttttgggggctttccttttattttttaaatgtaaaatttatttatattccgtatttaaagttgt

SEQ ID NO: 223 - protein, 332 aa, Homo Sapiens
MATLKDQLIYNLLKEEQTPQNKITVVGVGAVGMACAISILMKDLADELALVDVIEDKLKGEMMDLQHGSLFLRTPKIVSGKDYNVTANSKLVIITAGARQQEGESRLNLVQRNVNIFKFIIPNVVKYSPNCKLLIVSNPVDILTYVAWKISGFPKNRVIGSGCNLDSARFRYLMGERLGVHPLSCHGWVLGEHGDSSVPVWSGMNVAGVSLKTLHPDLGTDKDKEQWKEVHKQVVESAYEVIKLKGYTSWAIGLSVADLAESIMKNLRRVHPVSTMIKGLYGIKDDVFLSVPCILGQNGISDLVKVTLTSEEEARLKKSADTLWGIQKELQF

SEQ ID NO: 224 - DNA, 1661 bp, Homo Sapiens
tgctgcagccgctgccgccgattccggatctcattgccacgcgcccccgacgaccgcccgacgtgcattcccgattccttttggttccaagtccaatatggcaactctaaaggatcagctgatttataatcttctaaaggaagaacagaccccccagaataagattacagttgttggggttggtgctgttggcatggcctgtgccatcagtatcttaatgaaggacttggcagatgaacttgctcttgttgatgtcatcgaagacaaattgaagggagagatgatggatctccaacatggcagccttttccttagaacaccaaagattgtctctggcaaagactataatgtaactgcaaactccaagctggtcattatcacggctggggcacgtcagcaagagggagaaagccgtcttaatttggtccagcgtaacgtgaacatatttaaattcatcattcctaatgttgtaaaatacagcccgaactgcaagttgcttattgtttcaaatccagtggatatcttgacctacgtggcttggaagataagtggttttcccaaaaaccgtgttattggaagtggttgcaatctggattcagcccgattccgttacctgatgggggaaaggctgggagttcacccattaagctgtcatgggtgggtccttggggaacatggagattccagtgtgcctgtatggagtggaatgaatgttgctggtgtctctctgaagactctgcacccagatttagggactgataaagataaggaacagtggaaagaggttcacaagcaggtggttgagagtgcttatgaggtgatcaaactcaaaggctacacatcctgggctattggactctctgtagcagatttggcagagagtataatgaagaatcttaggcgggtgcacccagtttccaccatgattaagggtctttacggaataaaggatgatgtcttccttagtgttccttgcattttgggacagaatggaatctcagaccttgtgaaggtgactctgacttctgaggaagaggcccgtttgaagaagagtgcagatacactttgggggatccaaaaggagctgcaattttaaagtcttctgatgtcatatcatttcactgtctaggctacaacaggattctaggtggaggttgtgcatgttgtcctttttatctgatctgtgattaaagcagtaatattttaagatggactgggaaaaacatcaactcctgaagttagaaataagaatggtttgtaaaatccacagctatatcctgatgctggatggtattaatcttgtgtagtcttcaactggttagtgtgaaatagttctgccacctctgacgcaccactgccaatgctgtacgtactgcatttgccccttgagccaggtggatgtttaccgtgtgttatataacttcctggctccttcactgaacatgcctagtccaacattttttcccagtgagtcacatcctgggatccagtgtataaatccaatatcatgtcttgtgcataattcttccaaaggatcttattttgtgaactatatcagtagtgtacattaccatataatgtaaaaagatctacatacaaacaatgcaaccaactatccaagtgttataccaactaaaacccccaataaaccttgaacagtg

SEQ ID NO: 225 - protein, 295 aa, Homo Sapiens
METPAWPRVPRPETAVARTLLLGWVFAQVAGASGTTNTVAAYNLTWKSTNFKTILEWEPKPVNQVYTVQISTKSGDWKSKCFYTTDTECDLTDEIVKDVKQTYLARVFSYPAGNVESTGSAGEPLYENSPEFTPYLETNLGQPTIQSFEQVGTKVNVTVEDERTLVRRNNTFLSLRDVFGKDLIYTLYYWKSSSSGKKTAKTNTNEFLIDVDKGENYCFSVQAVIPSRTVNRKSTDSPVECMGQEKGEFREIFYIIGAVVFVVIILVIILAISLHKCRKAGVGQSWKENSPLNVS

SEQ ID NO: 226 - DNA, 2153 bp, Homo Sapiens
aagactgcgagctccccgcaccccctcgcactccctctggccggcccagggcgccttcagcccaacctccccagccccacgggcgccacggaacccgctcgatctcgccgccaactggtagacatggagacccctgcctggccccgggtcccgcgccccgagaccgccgtcgctcggacgctcctgctcggctgggtcttcgcccaggtggccggcgcttcaggcactacaaatactgtggcagcatataatttaacttggaaatcaactaatttcaagacaattttggagtgggaacccaaacccgtcaatcaagtctacactgttcaaataagcactaagtcaggagattggaaaagcaaatgcttttacacaacagacacagagtgtgacctcaccgacgagattgtgaaggatgtgaagcagacgtacttggcacgggtcttctcctacccggcagggaatgtggagagcaccggttctgctggggagcctctgtatgagaactccccagagttcacaccttacctggagacaaacctcggacagccaacaattcagagttttgaacaggtgggaacaaaagtgaatgtgaccgtagaagatgaacggactttagtcagaaggaacaacactttcctaagcctccgggatgtttttggcaaggacttaatttatacactttattattggaaatcttcaagttcaggaaagaaaacagccaaaacaaacactaatgagtttttgattgatgtggataaaggagaaaactactgtttcagtgttcaagcagtgattccctcccgaacagttaaccggaagagtacagacagcccggtagagtgtatgggccaggagaaaggggaattcagagaaatattctacatcattggagctgtggtatttgtggtcatcatccttgtcatcatcctggctatatctctacacaagtgtagaaaggcaggagtggggcagagctggaaggagaactccccactgaatgtttcataaaggaagcactgttggagctactgcaaatgctatattgcactgtgaccgagaacttttaagaggatagaatacatggaaacgcaaatgagtatttcggagcatgaagaccctggagttcaaaaaactcttgatatgacctgttattaccattagcattctggttttgacatcagcattagtcactttgaaatgtaacgaatggtactacaaccaattccaagttttaatttttaacaccatggcaccttttgcacataacatgctttagattatatattccgcacttaaggattaaccaggtcgtccaagcaaaaacaaatgggaaaatgtcttaaaaaatcctgggtggacttttgaaaagcttttttttttttttttttttgagacggagtcttgctctgttgcccaggctggagtgcagtagcacgatctcggctcacttgcaccctccgtctctcgggttcaagcaattgtctgcctcagcctcccgagtagctgggattacaggtgcgcactaccacgccaagctaatttttgtattttttagtagagatggggtttcaccatcttggccaggctggtcttgaattcctgacctcagtgatccacccaccttggcctcccaaagatgctagtattatgggcgtgaaccaccatgcccagccgaaaagcttttgaggggctgacttcaatccatgtaggaaagtaaaatggaaggaaattgggtgcatttctaggacttttctaacatatgtctataatatagtgtttaggttcttttttttttcaggaatacatttggaaattcaaaacaattgggcaaactttgtattaatgtgttaagtgcaggagacattggtattctgggcagcttcctaatatgctttacaatctgcactttaactgacttaagtggcattaaacatttgagagctaactatatttttataagactactatacaaactacagagtttatgatttaaggtacttaaagcttctatggttgacattgtatatataattttttaaaaaggtttttctatatggggattttctatttatgtaggtaatattgttctatttgtatatattgagataatttatttaatatactttaaataaaggtgactgggaattgtt

SEQ ID NO: 227 - protein, 191 aa, Homo Sapiens
MNFLLSWVHWSLALLLYLHHAKWSQAAPMAEGGGQNHHEVVKFMDVYQRSYCHPIETLVDIFQEYPDEIEYIFKPSCVPLMRCGGCCNDEGLECVPTEESNITMQIMRIKPHQGQHIGEMSFLQHNKCECRPKKDRARQENPCGPCSERRKHLFVQDPQTCKCSCKNTDSRCKARQLELNERTCRCDKPRR

SEQ ID NO: 228 - DNA, 649 bp, Homo Sapiens
tcgggcctccgaaaccatgaactttctgctgtcttgggtgcattggagccttgccttgctgctctacctccaccatgccaagtggtcccaggctgcacccatggcagaaggaggagggcagaatcatcacgaagtggtgaagttcatggatgtctatcagcgcagctactgccatccaatcgagaccctggtggacatcttccaggagtaccctgatgagatcgagtacatcttcaagccatcctgtgtgcccctgatgcgatgcgggggctgctgcaatgacgagggcctggagtgtgtgcccactgaggagtccaacatcaccatgcagattatgcggatcaaacctcaccaaggccagcacataggagagatgagcttcctacagcacaacaaatgtgaatgcagaccaaagaaagatagagcaagacaagaaaatccctgtgggccttgctcagagcggagaaagcatttgtttgtacaagatccgcagacgtgtaaatgttcctgcaaaaacacagactcgcgttgcaaggcgaggcagcttgagttaaacgaacgtacttgcagatgtgacaagccgaggcggtgagccgggcaggaggaaggagcctccctcagcgtttcgggaaccagatctctcaccagg

SEQ ID NO: 229 - protein, 394 aa, Homo Sapiens
MSREMQDVDLAEVKPLVEKGETITGLLQEFDVQEQDIETLHGSVHVTLCGTPKGNRPVILTYHDIGMNHKTCYNPLFNYEDMQEITQHFAVCHVDAPGQQDGAASFPAGYMYPSMDQLAEMLPGVLQQFGLKSIIGMGTGAGAYTLTRFALNNPEMVEGLVLINVNPCAEGWMDWAASKISGWTQALPDMVVSHLFGKEEMQSNVEVVHTYRQHIVNDMNPGNLHLFINAYNSRRDLEIERPMPGTHTVTLQCPALLVVGDSSPAVDAVVECNSKLDPTKTTLLKMADCGGLPQISQPAKLAEAFKYFVQGMGYMPSASMTRLMRSRTASGSSVTSLDGTRSRSHTSEGTRSRSHTSEGTRSRSHTSEGAHLDITPNSGAAGNSAGPKSMEVSC

SEQ ID NO: 230 - DNA, 3020 bp, Homo Sapiens
tgaagctcgtcagttcaccatccgccctcggcttccgcggggcgctgggccgccagcctcggcaccgtcctttcctttctccctcgcgttaggcaggtgacagcagggacatgtctcgggagatgcaggatgtagacctcgctgaggtgaagcctttggtggagaaaggggagaccatcaccggcctcctgcaagagtttgatgtccaggagcaggacatcgagactttacatggctctgttcacgtcacgctgtgtgggactcccaagggaaaccggcctgtcatcctcacctaccatgacatcggcatgaaccacaaaacctgctacaaccccctcttcaactacgaggacatgcaggagatcacccagcactttgccgtctgccacgtggacgcccctggccagcaggacggcgcagcctccttccccgcagggtacatgtacccctccatggatcagctggctgaaatgcttcctggagtccttcaacagtttgggctgaaaagcattattggcatgggaacaggagcaggcgcctacaccctaactcgatttgctctaaacaaccctgagatggtggagggccttgtccttatcaacgtgaacccttgtgcggaaggctggatggactgggccgcctccaagatctcaggatggacccaagctctgccggacatggtggtgtcccacctttttgggaaggaagaaatgcagagtaacgtggaagtggtccacacctaccgccagcacattgtgaatgacatgaaccccggcaacctgcacctgttcatcaatgcctacaacagccggcgcgacctggagattgagcgaccaatgccgggaacccacacagtcaccctgcagtgccctgctctgttggtggttggggacagctcgcctgcagtggatgccgtggtggagtgcaactcaaaattggacccaacaaagaccactctcctcaagatggcggactgtggcggcctcccgcagatctcccagccggccaagctcgctgaggccttcaagtacttcgtgcagggcatgggatacatgccctcggctagcatgacccgcctgatgcggtcccgcacagcctctggttccagcgtcacttctctggatggcacccgcagccgctcccacaccagcgagggcacccgaagccgctcccacaccagcgagggcacccgcagccgctcgcacaccagcgagggggcccacctggacatcacccccaactcgggtgctgctgggaacagcgccgggcccaagtccatggaggtctcctgctaggcggcctgcccagctgccgcccccggactctgatctctgtagtggccccctcctccccggccccttttcgccccctgcctgccatactgcgcctaactcggtattaatccaaagcttattttgtaagagtgagctctggtggagacaaatgaggtctattacgtgggtgccctctccaaaggcggggtggcggtggaccaaaggaaggaagcaagcatctccgcatcgcatcctcttccattaaccagtggccggttgccactctcctcccctccctcagagacaccaaactgccaaaaacaagacgcgtagcagcacacacttcacaaagccaagcctaggccgccctgagcatcctggttcaaacgggtgcctggtcagaaggccagccgcccacttcccgtttcctctttaactgaggagaagctgatccagctttccggaaacaaaatccttttcttcatttggggaggggggtaatagtgacatgcaggcacctcttttaaacaggcaaaacaggaagggggaaaaggtgggattcatgtcgaggctagaggcatttggaacaacaaatctacgtagttaacttgaagaaaccgatttttaaagttggtgcatctagaaagctttgaatgcagaagcaaacaagcttgatttttctagcatcctcttaatgtgcagcaaaagcaggcaacaaaatctcctggctttacagacaaaaatatttcagcaaacgttgggcatcatggtttttgaaggctttagttctgctttctgcctctcctccacagccccaacctcccacccctgatacatgagccagtgattattcttgttcagggagaagatcatttagatttgttttgcattccttagaatggagggcaacattccacagctgccctggctgtgatgagtgtccttgcaggggccggagtaggagcactggggtgggggcggaattggggttactcgatgtaagggattccttgttgttgtgttgagatccagtgcagttgtgatttctgtggatcccagcttggtccaggaattttgagagattggcttaaatccagttttcaatcttcgacagctgggctggaacgtgaactcagtagctgaacctgtctgacccggtcacgttcttggatcctcagaactctttgctcttgtcggggtgggggtgggaactcacgtggggagcggtggctgagaaaatgtaaggattctggaatacatattccatggactttccttccctctcctgcttcctcttttcctgctccctaacctttcgccgaatggggcagacaaacactgacgtttctgggtggccagtgcggctgccaggttcctgtactactgccttgtacttttcattttggctcaccgtggattttctcataggaagtttggtcagagtgaattgaatattgtaagtcagccactgggacccgaggatttctgggaccccgcagttgggaggaggaagtagtccagccttccaggtgggcgtgagaggcaatgactcgttacctgccgcccatcaccttggaggccttccctggccttgagtagaaaagtcggggatcggggcaagagaggctgagtacggatgggaaactattgtgcacaagtctttccagaggagtttcttaatgagatatttgtatttatttccagaccaataaatttgtaactttgcaaaaaaaaaaaaaaaaaaaa

SEQ ID NO: 231 - protein, 534 aa, Homo Sapiens
MIWYILIIGILLPQSLAHPGFFTSIGQMTDLIHTEKDLVTSLKDYIKAEEDKLEQIKKWAEKLDRLTSTATKDPEGFVGHPVNAFKLMKRLNTEWSELENLVLKDMSDGFISNLTIQRPVLSNDEDQVGAAKALLRLQDTYNLDTDTISKGNLPGVKHKSFLTAEDCFELGKVAYTEADYYHTELWMEQALRQLDEGEISTIDKVSVLDYLSYAVYQQGDLDKALLLTKKLLELDPEHQRANGNLKYFEYIMAKEKDVNKSASDDQSDQKTTPKKKGVAVDYLPERQKYEMLCRGEGIKMTPRRQKKLFCRYHDGNRNPKFILAPAKQEDEWDKPRIIRFHDIISDAEIEIVKDLAKPRLSRATVHDPETGKLTTAQYRVSKSAWLSGYENPVVSRINMRIQDLTGLDVSTAEELQVANYGVGGQYEPHFDFARKDEPDAFKELGTGNRIATWLFYMSDVSAGGATVFPEVGASVWPKKGTAVFWYNLFASGEGDYSTRHAACPVLVGNKWVSNKWLHERGQEFRRPCTLSELE

SEQ ID NO: 232 - DNA, 2722 bp, Homo Sapiens
gagcgggctgagggtaggaagtagccgctccgagtggaggcgactgggggctgaagagcgcgccgccctctcgtcccactttccaggtgtgtgatcctgtaaaattaaatcttccaagatgatctggtatatattaattataggaattctgcttccccagtctttggctcatccaggcttttttacttcaattggtcagatgactgatttgatccatactgagaaagatctggtgacttctctgaaagattatattaaggcagaagaggacaagttagaacaaataaaaaaatgggcagagaagttagatcggctaactagtacagcgacaaaagatccagaaggatttgttgggcatccagtaaatgcattcaaattaatgaaacgtctgaatactgagtggagtgagttggagaatctggtccttaaggatatgtcagatggctttatctctaacctaaccattcagagaccagtactttctaatgatgaagatcaggttggggcagccaaagctctgttacgtctccaggatacctacaatttggatacagataccatctcaaagggtaatcttccaggagtgaaacacaaatcttttctaacggctgaggactgctttgagttgggcaaagtggcctatacagaagcagattattaccatacggaactgtggatggaacaagccctaaggcaactggatgaaggcgagatttctaccatagataaagtctctgttctagattatttgagctatgcggtatatcagcagggagacctggataaggcacttttgctcacaaagaagcttcttgaactagatcctgaacatcagagagctaatggtaacttaaaatattttgagtatataatggctaaagaaaaagatgtcaataagtctgcttcagatgaccaatctgatcagaaaactacaccaaagaaaaaaggggttgctgtggattacctgccagagagacagaagtacgaaatgctgtgccgtggggagggtatcaaaatgacccctcggagacagaaaaaactcttttgccgctaccatgatggaaaccgtaatcctaaatttattctggctccagctaaacaggaggatgaatgggacaagcctcgtattattcgcttccatgatattatttctgatgcagaaattgaaatcgtcaaagacctagcaaaaccaaggctgagccgagctacagtacatgaccctgagactggaaaattgaccacagcacagtacagagtatctaagagtgcctggctctctggctatgaaaatcctgtggtgtctcgaattaatatgagaatacaagatctaacaggactagatgtttccacagcagaggaattacaggtagcaaattatggagttggaggacagtatgaaccccattttgactttgcacggaaagatgagccagatgctttcaaagagctggggacaggaaatagaattgctacatggctgttttatatgagtgatgtgtctgcaggaggagccactgtttttcctgaagttggagctagtgtttggcccaaaaaaggaactgctgttttctggtataatctgtttgccagtggagaaggagattatagtacacggcatgcagcctgtccagtgctagttggcaacaaatgggtatccaataaatggctccatgaacgtggacaagaatttcgaagaccttgtacgttgtcagaattggaatgacaaacaggcttccctttttctcctattgttgtactcttatgtgtctgatatacacatttccatagtcttaactttcaggagtttacaattgactaacactccatgattgattcagtcatgaacctcatcccatgtttcatctgtggacaattgcttactttgtgggttcttttaaaagtaacacgaaatcatcatattgcataaaaccttaaagttctgttggtatcacagaagacaaggcagagtttaaagtgaggaattttatatttaaagaactttttggttggataaaaacataatttgagcatccagttttagtatttcactacatctcagttggtgggtgttaagctagaatgggctgtgtgataggaaacaaatgccttacagatgtgcctaggtgttctgtttacctagtgtcttactctgttttctggatctgaagactagtaataaactaggacactaactgggttccatgtgattgccctttcatatgatcttctaagttgatttttttcctcccaagtcttttttaaagaaagtatactgtattttaccaaccccctctcttttcttttagctcctctgtggtgaattaaacgtacttgagttaaaatatttcgattttttttttttttttaatggaaagtcctgcataacaacactgggccttcttaactaaaatgctcaccacttagcctgtttttttatcccttttttaaaatgacagatgattttgttcaggaattttgctgtttttcttagtgctaataccttgcctcttattcctgctacagcagggtggtaatattggcattctgattaaatactgtgccttaggagactggaagtttaaaaatgtacaagtcctttcagtgatgagggaattgattttttttaaaagtctttttcttagaaagccaaaatgtttgtttttttaagattctgaaatgtgttgtgacaacaatgacctatttatgatcttaaatctttttt

SEQ ID NO: 233 - protein, 194 aa, Homo Sapiens
MSQNGAPGMQEESLQGSWVELHFSNNGNGGSVPASVSIYNGDMEKILLDAQHESGRSSSKSSHCDSPPRSQTPQDTNRASETDTHSIGEKNSSQSEEDDIERRKEVESILKKNSDWIWDWSSRPENIPPKEFLFKHPKRTATLSMRNTSVMKKGGIFSAEFLKVFLPSLLLSHLLAIGLGIYIGRRLTTSTSTF

SEQ ID NO: 234 - DNA, 1535 bp, Homo Sapiens
cctccgctcagtccgggagcgcacgtgggccgcggcgctccgacctccgctttcccaccgcccgcagctgaagcacatcccgcagcccggcgcggactccgatcgccgcagttgccctctggcgccatgtcgcagaacggagcgcccgggatgcaggaggagagcctgcagggctcctgggtagaactgcacttcagcaataatgggaacgggggcagcgttccagcctcggtttctatttataatggagacatggaaaaaatactgctggacgcacagcatgagtctggacggagtagctccaagagctctcactgtgacagcccacctcgctcgcagacaccacaagataccaacagggcttctgaaacagatacccatagcattggagagaaaaacagctcacagtctgaggaagatgatattgaaagaaggaaagaagttgaaagcatcttgaagaaaaactcagattggatatgggattggtcaagtcggccggaaaatattccccccaaggagttcctctttaaacacccgaagcgcacggccaccctcagcatgaggaacacgagcgtcatgaagaaagggggcatattctctgcagaatttctgaaagttttccttccatctctgctgctctctcatttgctggccatcggattggggatctatattggaaggcgtctgacaacctccaccagcaccttttgatgaagaactggagtctgacttggttcgttagtggattacttctgagcttgcaacatagctcactgaagagctgttagatcctggggtggccacgtcacttgtgtttatttgttctgtaaatgctgcgttcctaatttagtaaaataaaagaatagacactaaaatcatgttgatctataattacacctatgggatcaataagcatgtcagactgattaatgtctactgtgaaaatttggtagtaaattttcatttgatattagatataaatatctgaatataaataattttaatatactagtcatgatgtgtgttgtattttaaaaattatctgcaaccttaattcagctgaagtactttatatttcaaaagaatgaataacattgataataaaatcgctactttaaggggtttgtccaaaataaatattgtggccttatatatcacactattgtagaaagtattatttaatttaaatggatgcaggttgtctactaaagaaagattatatataactatgctaattgttcataatcaacagaaaccaagatagagctacaaactcagctgtacagttcgtacactaaactcttcttgcttttgcattataaggaattaagtctccgattattaggtgatcaccctggatgatcagttttctgctgaaggcacctactcagtatcttttcctctttatcactctgcattggtgaatttaatcctctcctttgtgttcaacttttgtgtgcttttaaaatcagctttattctaagcaaatctgtgtctactttaaaaaactggaaatggaaaaaaaaataaatctt

SEQ ID NO: 235 - protein, 402 aa, Homo Sapiens [sequence omitted]

SEQ ID NO: 236 - DNA, 2876 bp, Homo Sapiens
gaattcctgcagctcagcagccgccgccagagcaggacgaaccgccaatcgcaaggcacctctgagaacttcaggatgcagatgtctccagccctcacctgcctagtcctgggcctggcccttgtctttggtgaagggtctgctgtgcaccatcccccatcctacgtggcccacctggcctcagacttcggggtgagggtgtttcagcaggtggcgcaggcctccaaggaccgcaacgtggttttctcaccctatggggtggcctcggtgttggccatgctccagctgacaacaggaggagaaacccagcagcagattcaagcagctatgggattcaagattgatgacaagggcatggcccccgccctccggcatctgtacaaggagctcatggggccatggaacaaggatgagatcagcaccacagacgcgatcttcgtccagcgggatctgaagctggtccagggcttcatgccccacttcttcaggctgttccggagcacggtcaagcaagtggacttttcagaggtggagagagccagattcatcatcaatgactgggtgaagacacacacaaaaggtatgatcagcaacttgcttgggaaaggagccgtggaccagctgacacggctggtgctggtgaatgccctctacttcaacggccagtggaagactcccttccccgactccagcacccaccgccgcctcttccacaaatcagacggcagcactgtctctgtgcccatgatggctcagaccaacaagttcaactatactgagttcaccacgcccgatggccattactacgacatcctggaactgccctaccacggggacaccctcagcatgttcattgctgccccttatgaaaaagaggtgcctctctctgccctcaccaacattctgagtgcccagctcatcagccactggaaaggcaacatgaccaggctgccccgcctcctggttctgcccaagttctccctggagactgaagtcgacctcaggaagcccctagagaacctgggaatgaccgacatgttcagacagtttcaggctgacttcacgagtctttcagaccaagagcctctccacgtcgcgcaggcgctgcagaaagtgaagatcgaggtgaacgagagtggcacggtggcctcctcatccacagctgtcatagtctcagcccgcatggcccccgaggagatcatcatggacagacccttcctctttgtggtccggcacaaccccacaggaacagtccttttcatgggccaagtgatggaaccctgaccctggggaaagacgccttcatctgggacaaaactggagatgcatcgggaaagaagaaactccgaagaaaagaattttagtgttaatgactctttctgaaggaagagaagacatttgccttttgttaaaagatggtaaaccagatctgtctccaagaccttggcctctccttggaggacctttaggtcaaactccctagtctccacctgagaccctgggagagaagtttgaagcacaactcccttaaggtctccaaaccagacggtgacgcctgcgggaccatctggggcacctgcttccacccgtctctctgcccactcgggtctgcagacctggttcccactgaggccctttgcaggatggaactacggggcttacaggagcttttgtgtgcctggtagaaactatttctgttccagtcacattgccatcactcttgtactgcctgccaccgcggaggaggctggtgacaggccaaaggccagtggaagaaacaccctttcatctcagagtccactgtggcactggccacccctccccagtacaggggtgctgcaggtggcagagtgaatgtcccccatcatgtggcccaactctcctggcctggccatctccctccccagaaacagtgtgcatgggttattttggagtgtaggtgacttgtttactcattgaagcagatttctgcttccttttatttttataggaatagaggaagaaatgtcagatgcgtgcccagctcttcaccccccaatctcttggtggggaggggtgtacctaaatatttatcatatccttgcccttgagtgcttgttagagagaaagagaactactaaggaaaataatattatttaaactcgctcctagtgtttctttgtggtctgtgtcaccgtatctcaggaagtccagccacttgactggcacacacccctccggacatccagcgtgacggagcccacactgccaccttgtggccgcctgagaccctcgcgccccccgcgccccccgcgcccctctttttccccttgatggaaattgaccatacaatttcatcctccttcaggggatcaaaaggacggagtggggggacagagactcagatgaggacagagtggtttccaatgtgttcaatagatttaggagcagaaatgcaaggggctgcatgacctaccaggacagaactttccccaattacagggtgactcacagccgcattggtgactcacttcaatgtgtcatttccggctgctgtgtgtgagcagtggacacgtgaggggggggtgggtgagagagacaggcagctcggattcaactaccttagataatatttctgaaaacctaccagccagagggtagggcacaaagatggatgtaatgcactttgggaggccaaggcgggaggattgcttgagcccaggagttcaagaccagcctgggcaacataccaagacccccgtctctttaaaaatatatatattttaaatatacttaaatatatatttctaatatctttaaatatatatatatattttaaagaccaatttatgggagaattgcacacagatgtgaaatgaatgtaatctaatagaagc

SEQ ID NO: 237 - protein, 604 aa, Homo Sapiens
MLARALLLCAVLALSHTANPCCSHPCQNRGVCMSVGFDQYKCDCTRTGFYGENCSTPEFLTRIKLFLKPTPNTVHYILTHFKGFWNVVNNIPFLRNAIMSYVLTSRSHLIDSPPTYNADYGYKSWEAFSNLSYYTRALPPVPDDCPTPLGVKGKKQLPDSNEIVEKLLLRRKFIPDPQGSNMMFAFFAQHFTHQFFKTDHKRGPAFTNGLGHGVDLNHIYGETLARQRKLRLFKDGKMKYQIIDGEMYPPTVKDTQAEMIYPPQVPEHLRFAVGQEVFGLVPGLMMYATIWLREHNRVCDVLKQEHPEWGDEQLFQTSRLILIGETIKIVIEDYVQHLSGYHFKLKFDPELLFNKQFQYQNRIAAEFNTLYHWHPLLPDTFQIHDQKYNYQQFIYNNSILLEHGITQFVESFTRQIAGRVAGGRNVPPAVQKVSQASIDQSRQMKYQSFNEYRKRFMLKPYESFEELTGEKEMSAELEALYGDIDAVELYPALLVEKPRPDAIFGETMVEVGAPFSLKGLMGNVICSPAYWKPSTFGGEVGFQIINTASIQSLICNNVKGCPFTSFSVPDPELIKTVTINASSSRSGLDDINPTVLLKERSTEL

SEQ ID NO: 238 - DNA, 4465 bp, Homo Sapiens
caattgtcatacgacttgcagtgagcgtcaggagcacgtccaggaactcctcagcagcgcctccttcagctccacagccagacgccctcagacagcaaagcctacccccgcgccgcgccctgcccgccgctcggatgctcgcccgcgccctgctgctgtgcgcggtcctggcgctcagccatacagcaaatccttgctgttcccacccatgtcaaaaccgaggtgtatgtatgagtgtgggatttgaccagtataagtgcgattgtacccggacaggattctatggagaaaactgctcaacaccggaatttttgacaagaataaaattatttctgaaacccactccaaacacagtgcactacatacttacccacttcaagggattttggaacgttgtgaataacattcccttccttcgaaatgcaattatgagttatgtcttgacatccagatcacatttgattgacagtccaccaacttacaatgctgactatggctacaaaagctgggaagccttctctaacctctcctattatactagagcccttcctcctgtgcctgatgattgcccgactcccttgggtgtcaaaggtaaaaagcagcttcctgattcaaatgagattgtggaaaaattgcttctaagaagaaagttcatccctgatccccagggctcaaacatgatgtttgcattctttgcccagcacttcacgcatcagtttttcaagacagatcataagcgagggccagctttcaccaacgggctgggccatggggtggacttaaatcatatttacggtgaaactctggctagacagcgtaaactgcgccttttcaaggatggaaaaatgaaatatcagataattgatggagagatgtatcctcccacagtcaaagatactcaggcagagatgatctaccctcctcaagtccctgagcatctacggtttgctgtggggcaggaggtctttggtctggtgcctggtctgatgatgtatgccacaatctggctgcgggaacacaacagagtatgcgatgtgcttaaacaggagcatcctgaatggggtgatgagcagttgttccagacaagcaggctaatactgataggagagactattaagattgtgattgaagattatgtgcaacacttgagtggctatcacttcaaactgaaatttgacccagaactacttttcaacaaacaattccagtaccaaaatcgtattgctgctgaatttaacaccctctatcactggcatccccttctgcctgacacctttcaaattcatgaccagaaatacaactatcaacagtttatctacaacaactctatattgctggaacatggaattacccagtttgttgaatcattcaccaggcaaattgctggcagggttgctggtggtaggaatgttccacccgcagtacagaaagtatcacaggcttccattgaccagagcaggcagatgaaataccagtcttttaatgagtaccgcaaacgctttatgctgaagccctatgaatcatttgaagaacttacaggagaaaaggaaatgtctgcagagttggaagcactctatggtgacatcgatgctgtggagctgtatcctgcccttctggtagaaaagcctcggccagatgccatctttggtgaaaccatggtagaagttggagcaccattctccttgaaaggacttatgggtaatgttatatgttctcctgcctactggaagccaagcacttttggtggagaagtgggttttcaaatcatcaacactgcctcaattcagtctctcatctgcaataacgtgaagggctgtccctttacttcattcagtgttccagatccagagctcattaaaacagtcaccatcaatgcaagttcttcccgctccggactagatgatatcaatcccacagtactactaaaagaacgttcgactgaactgtagaagtctaatgatcatatttatttatttatatgaaccatgtctattaatttaattatttaataatatttatattaaactccttatgttacttaacatcttctgtaacagaagtcagtactcctgttgcggagaaaggagtcatacttgtgaagacttttatgtcactactctaaagattttgctgttgctgttaagtttggaaaacagtttttattctgttttataaaccagagagaaatgagttttgacgtctttttacttgaatttcaacttatattataagaacgaaagtaaagatgtttgaatacttaaacactatcacaagatggcaaaatgctgaaagtttttacactgtcgatgtttccaatgcatcttccatgatgcattagaagtaactaatgtttgaaattttaaagtacttttggttatttttctgtcatcaaacaaaaacaggtatcagtgcattattaaatgaatatttaaattagacattaccagtaatttcatgtctactttttaaaatcagcaatgaaacaataatttgaaatttctaaattcatagggtagaatcacctgtaaaagcttgtttgatttcttaaagttattaaacttgtacatataccaaaaagaagctgtcttggatttaaatctgtaaaatcagatgaaattttactacaattgcttgttaaaatattttataagtgatgttcctttttcaccaagagtataaacctttttagtgtgactgttaaaacttccttttaaatcaaaatgccaaatttattaaggtggtggagccactgcagtgttatctcaaaataagaatattttgttgagatattccagaatttgtttatatggctggtaacatgtaaaatctatatcagcaaaagggtctacctttaaaataagcaataacaaagaagaaaaccaaattattgttcaaatttaggtttaaacttttgaagcaaacttttttttatccttgtgcactgcaggcctggtactcagattttgctatgaggttaatgaagtaccaagctgtgcttgaataacgatatgttttctcagattttctgttgtacagtttaatttagcagtccatatcacattgcaaaagtagcaatgacctcataaaatacctcttcaaaatgcttaaattcatttcacacattaattttatctcagtcttgaagccaattcagtaggtgcattggaatcaagcctggctacctgcatgctgttccttttcttttcttcttttagccattttgctaagagacacagtcttctcatcacttcgtttctcctattttgttttactagttttaagatcagagttcactttctttggactctgcctatattttcttacctgaacttttgcaagttttcaggtaaacctcagctcaggactgctatttagctcctcttaagaagattaaaagagaaaaaaaaaggcccttttaaaaatagtatacacttattttaagtgaaaagcagagaattttatttatagctaattttagctatctgtaaccaagatggatgcaaagaggctagtgcctcagagagaactgtacggggtttgtgactggaaaaagttacgttcccattctaattaatgccctttcttatttaaaaacaaaaccaaatgatatctaagtagttctcagcaataataataatgacgataatacttcttttccacatctcattgtcactgacatttaatggtactgtatattacttaatttattgaagattattatttatgtcttattaggacactatggttataaactgtgtttaagcctacaatcattgatttttttttgttatgtcacaatcagtatattttctttggggttacctctctgaatattatgtaaacaatccaaagaaatgattgtattaagatttgtgaataaatttttagaaatctgattggcatattgagatatttaaggttgaatgtttgtccttaggataggcctatgtgctagcccacaaagaatattgtctcattagcctgaatgtgccataagactgaccttttaaaatgttttgagggatctgtggatgcttcgttaatttgttcagccacaatttattgagaaaatattctgtgtcaagcactgtgggttttaatatttttaaatcaaacgctgattacagataatagtatttatataaataattgaaaaaaattttcttttgggaagagggagaaaatgaaataaatatcattaaagataactcaggagaatcttctttacaattttacgtttagaatgtttaaggttaagaaagaaatagtcaatatgcttgtataaaacactgttcactgttttttttaaaaaaaaaacttgatttgttattaacattgatctgctgacaaaacctgggaatttgggttgtgtatgcgaatgtttcagtgcctcagacaaatgtgtatttaacttatgtaaaagataagtctggaaataaatgtctgtttatttttgtactattta

SEQ ID NO: 239 - protein, 61 aa, Homo Sapiens
MDPNCSCEAGGSCACAGSCKCKKCKCTSCKKSCCSCCPLGCAKCAQGCICKGASEKCSCCA

SEQ ID NO: 240 - DNA, 367 bp, Homo Sapiens
ctccagtctcacctcggcttgcaatggaccccaactgctcctgcgaggctggtggctcctgcgcctgcgccggctcctgcaagtgcaaaaagtgcaaatgcacctcctgcaagaagagctgctgctcctgttgccccctgggctgtgccaagtgtgcccagggctgcatctgcaaaggggcgtcagagaagtgcagctgctgtgcctgatgtcgggacagccctgctgtcagatgaaaacagaatgacacgtaaaatccgaggttttttttttctacaactccgactcatttgctacattcctttttttctgtgaaatatgtgaataataattaaacacttagacttgaaaaaaaaaaaaaaaaaaa

SEQ ID NO: 241 - protein, 61 aa, Homo Sapiens
MDPNCSCSPVGSCACAGSCKCKECKCTSCKKSCCSCCPVGCAKCAQGCICKGTSDKCSCCA

SEQ ID NO: 242 - DNA, 415 bp, Homo Sapiens
ccgctgcgtgttttcctcttgatcgggaactcctgcttctccttgcctcgaaatggaccccaactgctcctgctcgcctgttggctcctgtgcctgtgccggctcctgcaaatgcaaagagtgcaaatgcacctcctgcaagaagagctgctgctcctgctgccctgtgggctgtgcmaagtgtgcccagggctgcatctgcaaagggacgtcagacaagtgcagctgctgtgcctgatgccaggacagctgtgctctcagatgtaaatagagcaacctatataaacctggatttttttttttttttttttgtacaaccctgacccgtttgctacatctttttttctatgaaatatgtgaatggcaataaattcatctagactaaaaaaaaaaaaaaaaaaaaaaaaaaaaaaaa

SEQ ID NO: 243 - protein, 61 aa, Homo Sapiens
MDPNCSCAAGVSCTCASSCKCKECKCTSCKKSCCSCCPVGCAKCAQGCICKGASEKCSCCA

SEQ ID NO: 244 - DNA, 396 bp, Homo Sapiens
actccgccttccacgtgcacccactgcctcttcccttctcgcttgggaactctagtctcgcctcgggttgcaatggaccccaactgctcctgtgccgctggtgtctcctgcacctgcgccagctcctgcaagtgcaaagagtgcaaatgcacctcctgcaagaagagctgctgctcctgctgccctgtgggctgtgccaagtgtgcccaaggctgcatctgcaaaggggcatcggagaagtgcagctgctgcgcctgatgtcgggacagccctgctcccaagtacaaatagagtgacccgtaaaatctaggattttttgttttttgctacaatcttgacccctttgctacattcccttttttctgtgaaatatgtgaataataattaaacacttag

SEQ ID NO: 245 - skipped

SEQ ID NO: 246 - DNA, 296 bp, Homo Sapiens
tttaaagtcaaaattgtttttattgtcagtcacatatttagtataaaaagaaatgcagcaaatggctcagtgttgtatttttaaaaaaatccaggttgtgcaggttgttctatttacatctgggagaagagctgttcccacatcaggcacagcagctgcacttctccgatgcccctttgcagacgcagccctgggacacttggcacagccacggggagcaggaacagcagctcttcttgcaggaggtgcatttgcactctttgcacttgcaggagccggcgcacgtgcaggagcca

SEQ ID NO: 247 - protein, 496 aa, Homo Sapiens
MGTQKVTPALIFAITVATIGSFQFGYNTGVINAPEKIIKEFINKTLTDKGNAPPSEVLLTSLWSLSVAIFSVGGMIGSFSVGLFVNRFGRRNSMLIVNLLAVTGGCFMGLCKVAKSVEMLILGRLVIGLFCGLCTGFVPMYIGEISPTALRGAFGTLNQLGIVVGILVAQIFGLEFILGSEELWPLLLGFTILPAILQSAALPFCPESPRFLLINRKEEENAKQILQRLWGTQDVSQDIQEMKDESARMSQEKQVTVLELFRVSSYRQPIIISIVLQLSQQLSGINAVFYYSTGIFKDAGVQEPIYATIGAGVVNTIFTVVSLFLVERAGRRTLHMIGLGGMAFCSTLMTVSLLLKDNYNGMSFVCIGAILVFVAFFEIGPGPIPWFIVAELFSQGPRPAAMAVAGCSNWTSNFLVGLLFPSAAHYLGAYVFIIFTGFLITFLAFTFFKVPETRGRTFEDITRAFEGQAHGADRSGKDGVMEMNSIEPAKETTTNV

SEQ ID NO: 248 - DNA, 3915 bp, Homo Sapiens
gtggggtggggtggggctgggggcttgtcgccctttcaggctccaccctttgcggagattataaatagtcatgatcccagcgagacccagagatgcctgtaatggtgagactttggatccttcctgaggacgtggagaaaactttctgctgagaaggacattttgaaggttttgttggctgaaaaagctgtttctggaatcacccctagatctttcttgaagacttgaattagattacagcgatggggacacagaaggtcaccccagctctgatatttgccatcacagttgctacaatcggctctttccaatttggctacaacactggggtcatcaatgctcctgagaagatcataaaggaatttatcaataaaactttgacggacaagggaaatgccccaccctctgaggtgctgctcacgtctctctggtccttgtctgtggccatattttccgtcgggggtatgatcggctccttttccgtcggactcttcgtcaaccgctttggcaggcgcaattcaatgctgattgtcaacctgttggctgtcactggtggctgctttatgggactgtgtaaagtagctaagtcggttgaaatgctgatcctgggtcgcttggttattggcctcttctgcggactctgcacaggttttgtgcccatgtacattggagagatctcgcctactgccctgcggggtgcctttggcactctcaaccagctgggcatcgttgttggaattctggtggcccagatctttggtctggaattcatccttgggtctgaagagctatggccgctgctactgggttttaccatccttcctgctatcctacaaagtgcagcccttccattttgccctgaaagtcccagatttttgctcattaacagaaaagaagaggagaatgctaagcagatcctccagcggttgtggggcacccaggatgtatcccaagacatccaggagatgaaagatgagagtgcaaggatgtcacaagaaaagcaagtcaccgtgctagagctctttagagtgtccagctaccgacagcccatcatcatttccattgtgctccagctctctcagcagctctctgggatcaatgctgtgttctattactcaacaggaatcttcaaggatgcaggtgttcaagagcccatctatgccaccatcggcgcgggtgtggttaatactatcttcactgtagtttctctatttctggtggaaagggcaggaagaaggactctgcatatgataggccttggagggatggctttttgttccacgctcatgactgtttctttgttattaaaggataactataatgggatgagctttgtctgtattggggctatcttggtctttgtagccttctttgaaattggaccaggccccattccctggtttattgtggccgaactcttcagccagggcccccgcccagctgcgatggcagtggccggctgctccaactggacctccaacttcctagtcggattgctcttcccctccgctgctcactatttaggagcctacgtttttattatcttcaccggcttcctcattaccttcttggcttttaccttcttcaaagtccctgagacccgtggcaggacttttgaggatatcacacgggcctttgaagggcaggcacacggtgcagatagatctggaaaggacggcgtcatggagatgaacagcatcgagcctgctaaggagaccaccaccaatgtctaagtcgtgcctccttccacctccctcccggcatgggaaagccacctctccctcaacaagggagagacctcatcaggatgaacccaggacgcttctgaatgctgctacttaattcctttctcatcccacgcactccatgagcaccccaaggctgcggtttgttggatcttcaatggctttttaaattttatttcctggacatcctcttctgcttaggagagaccgagtgaacctaccttcatttcaggagggattggccgcttggcacatgacaactttgccagcttttcctcccttgggttctgatattgccgcactaggggatataggagaggaaaagtaaggtgcagttcccccaacctcagacttaccaggaagcagatacatatgagtgtggaagccggagggtgtttatgtaagagcaccttcctcacttccatacagctctacgtggcaaattaacttgagttttatttattttatcctctggtttaattacataatttttttttttttactttaagtttcaggatacatgtgccgaatgtgcaggtttgttacataggtatatatatgccatgatggaaatatttatttttttaagcgtaattttgccaaataataaaaacagaaggaaattgagattagagggaggtgtttaaagagaggttatagagtagaagatttgatgctggagaggttaaggtgcaataagaatttagggagaaatgttgttcattattggagggtaaatgatgtggtgcctgaggtctgtacgttacctcttaacaatttctgtccttcagatggaaactctttaacttctcgtaaaagtcatatacctatataataaagctactgatttccttggagcttttttctttaagataatagtttacatgtagtagtacttgaaatctaggattattaactaatatgggcattgtagttaatgatggttgatgggttctaattttggatggagtccagggaagagaaagtgatttctagaaagcctgttcccctcactggatgaaataactccttcttgtagtagtctcattacttttgaagtaatcccgccacctatctcgtgggagagccatccaaataagaaacctaaaataattggttcttggtagagattcattatttttccactttgttctttaggagattttaggtgttgattttctgttgtattttaactcatacctttaaaggaattccccaaagaatgtttatagcaaacttggaatttgtaacctcagctctgggagaggatttttttctgagcgattattatctaaagtgtgttgttgctttaggctcacggcacgcttgcgtatgtctgttaccatgtcactgtggtcctatgccgaatgccctcaggggacttgaatctttccaataaaccaggtttagacagtatgagtcaatgtgcagtgtagcccacacttgagaggatgaatgtatgtgcactgtcactttgctctgggtggaagtacgttattgttgacttattttctctgtgtttgttcctacagcccctttttcatatgttgctcagtctccctttcccttcttggtgcttacacatctcagaccctttagccaaacccttgtcagtgacagtattttggttcttagttctcactgttccctctgctcctggagcctttgaataaaaatgcacgtagctgaggccggatgcggtggctcacgcctgtaatcccagcactttgggaggcctaggcgggcggtcaggggttcgagaccagtctggccaacatcgtgaaaccctgtctctactaaaaatgcaaaaattagccgggcgtggtggcgggcgcctgtaatcccagctacttgggaagctgaggcgggagaatcatgtgaacccgggacgcaggggttgcagtgagcggagatcgcatcattgcactctagcctgggccacagggcgagactccgtctcaaaaaaaaaaaaatgcacatagctatcgagtgtgctttagcttgaaaaggtgaccttgcaacttcatgtcaactttctggctcctcaaacagtaggttggcagtaaggcagggtcccatttctcactgagaagattgtgaatatttccatatggattttctattgttactctggttctttgttttaaaataaaaattctgaatgtacacg

SEQ ID NO: 249 - protein, 917 aa, Homo Sapiens
MIASHLLAYFFTELNHDQVQKVDQYLYHMRLSDETLLEISKRFRKEMEKGLGATTHPTAAVKMLPTFVRSTPDGTEHGEFLALDLGGTNFRVLWVKVTDNGLQKVEMENQIYAIPEDIMRGSGTQLFDHIAECLANFMDKLQIKDKKLPLGFTFSFPCHQTKLDESFLVSWTKGFKSSGVEGRDVVALIRKAIQRRGDFDIDIVAVVNDTVGTMMTCGYDDHNCEIGLIVGTGSNACYMEEMRHIDMVEGDEGRMCINMEWGAFGDDGSLNDIRTEFDQEIDMGSLNPGKQLFEKMISGMYMGELVRLILVKMAKEELLFGGKLSPELLNTGRFETKDISDIEGEKDGIRKAREVLMRLGLDPTQEDCVATHRICQIVSTRSASLCAATLAAVLQRIKENKGEERLRSTIGVDGSVYKKHPHFAKRLHKTVRRLVPGCDVRFLRSEDGSGKGAAMVTAVAYRLADQHRARQKTLEHLQLSHDQLLEVKRRMKVEMERGLSKETHASAPVKMLPTYVCATPDGTEKGDFLALDLGGTNFRVLLVRVRNGKWGGVEMHNKIYAIPQEVMHGTGDELFDHIVQCIADFLEYMGMKGVSLPLGFTFSFPCQQNSLDESILLKWTKGFKASGCEGEDVVTLLKEAIHRREEFDLDVVAVVNDTVGTMMTCGFEDPHCEVGLIVGTGSNACYMEEMRNVELVEGEEGRMCVNMEWGAFGDNGCLDDFRTEFDVAVDELSLNPGKQRFEKMISGMYLGEIVRNILIDFTKRGLLFRGRISERLKTRGIFETKFLSQIESDCLALLQVRAILQHLGLESTCDDSIIVKEVCTVVARRAAQLCGAGMAAVVDRIRENRGLDALKVTVGVDGTLYKLHPHFAKVMHETVKDLAPKCDVSFLQSEDGSGKGAALITAVACRIREAGQR

SEQ ID NO: 250 - DNA, 4251 bp, Homo Sapiens
gttgcatgaaactccggcgcaggagtcccgggctgccgctggcaacatcgtgtcacccagctaagaaaatccgcgggcccgagccacgcgcctgtgaatcggagaggtcccactgcccgagtggagccgggctgagattcttctcaagttgagcctcagtgatcctgtggccgaagttagcgccttgacgtgggacaaccggacacgtcgccaggagagaactgaggcgccttctagcagttgtgacgccaaaatcacgtctccggagacccgcgccctccgccagccgggcgcaccctcgccggtagccttctttgtgcgccgtccggactcccagctcccggcccggcagccgagccccagcacaaagcagtcggaccgcgccgcccgcctcccctctcgcgtctccgcctcggtttcccaactctgcgccgtcgggccgcggcaggatgattgcctcgcatctgcttgcctacttcttcacggagctcaaccatgaccaagtgcagaaggttgaccagtatctctaccacatgcgcctctctgatgagaccctcttggagatctctaagcggttccgcaaggagatggagaaagggcttggagccaccactcaccctactgcagcagtgaagatgctgcccacctttgtgaggtccactccagatgggacagaacacggagagttcctggctctggatcttggagggaccaacttccgtgtgctttgggtgaaagtaacggacaatgggctccagaaggtggagatggagaatcagatctatgccatccctgaggacatcatgcgaggcagtggcacccagctgtttgaccacattgccgaatgcctggctaacttcatggataagctacaaatcaaagacaagaagctcccactgggttttaccttctcgttcccctgccaccagactaaactagacgagagtttcctggtctcatggaccaagggattcaagtccagtggagtggaaggcagagacgttgtggctctgatccggaaggccatccagaggagaggggactttgatatcgacattgtggctgtggtgaatgacacagttgggaccatgatgacctgtggttatgatgaccacaactgtgagattggtctcattgtgggcacgggcagcaacgcctgctacatggaagagatgcgccacatcgacatggtggaaggcgatgaggggcggatgtgtatcaatatggagtggggggccttcggggacgatggctcgctcaacgacattcgcactgagtttgaccaggagattgacatgggctcactgaacccgggaaagcaactgtttgagaagatgatcagtgggatgtacatgggggagctggtgaggcttatcctggtgaagatggccaaggaggagctgctctttggggggaagctcagcccagagcttctcaacaccggtcgctttgagaccaaagacatctcagacattgaaggggagaaggatggcatccggaaggcccgtgaggtcctgatgcggttgggcctggacccgactcaggaggactgcgtggccactcaccggatctgccagatcgtgtccacacgctccgccagcctgtgcgcagccaccctggccgccgtgctgcagcgcatcaaggagaacaaaggcgaggagcggctgcgctctactattggggtcgacggttccgtctacaagaaacacccccattttgccaagcgtctacataagaccgtgcggcggctggtgcccggctgcgatgtccgcttcctccgctccgaggatggcagtggcaaaggtgcagccatggtgacagcagtggcttaccggctggccgatcaacaccgtgcccgccagaagacattagagcatctgcagctgagccatgaccagctgctggaggtcaagaggaggatgaaggtagaaatggagcgaggtctgagcaaggagactcatgccagtgcccccgtcaagatgctgcccacctacgtgtgtgctaccccggacggcacagagaaaggggacttcttggccttggaccttggaggaacaaatttccgggtcctgctggtccgtgttcggaatgggaagtggggtggagtggagatgcacaacaagatctacgccatcccgcaggaggtcatgcacggcaccggggacgagctctttgaccacattgtccagtgcatcgcggacttcctcgagtacatgggcatgaagggcgtgtccctgcctctgggttttaccttctccttcccctgccagcagaacagcctggacgagagcatcctcctcaagtggacaaaaggcttcaaggcatctggctgcgagggcgaggacgtggtgaccctgctgaaggaagcgatccaccggcgagaggagtttgacctggatgtggttgctgtggtgaacgacacagtcggaactatgatgacctgtggctttgaagaccctcactgtgaagttggcctcattgttggcacgggcagcaatgcctgctacatggaggagatgcgcaacgtggaactggtggaaggagaagaggggcggatgtgtgtgaacatggaatggggggcattcggggacaatggatgcctagatgacttccgcacagaatttgatgtggctgtggatgagctttcactcaaccccggcaagcagaggttcgagaaaatgatcagtggaatgtacctgggtgagattgtccgtaacattctcatcgatttcaccaagcgtggactgctcttccgaggccgcatctcagagcggctcaagacaaggggcatctttgaaaccaagttcttgtctcagattgagagtgactgcctggccctgctgcaagtccgagccatcctgcaacacttagggcttgagagcacctgtgacgacagcatcattgttaaggaggtgtgcactgtggtggcccggcgggcagcccagctctgtggcgcaggcatggccgctgtggtggacaggatacgagaaaaccgtgggctggacgctctcaaagtgacagtgggtgtggatgggaccctctacaagctacatcctcactttgccaaagtcatgcatgagacagtgaaggacctggctccgaaatgtgatgtgtctttcctgcagtcagaggatggcagcgggaagggggcggcgctcatcactgctgtggcctgccgcatccgtgaggctggacagcgatagaacccctgaaatcggaagggacttcctctttctctccttcttccctgttttaaattataagatgtcatccccttgtgtcagagacagaccccttggcttttgcttggcagagaggaccccactggactgggttttgtctctgcatctcattgtagagcttggtggctgagcttggccctattaagataaatagagttccaaataaggatttgttcacatgcatcataaccattcccattggttctcctaaaacatgaaaattatctcccttagtaatcccccttgccaaattccatgtccctgtataattctacaggatggggacactaatgaagatacggttgcttcaccttggagcctgaacatgacatttctaagtggggtgcatcccccagcactgatgttgttactgattctcctgtcagagatctgggaggtctccactgaggatgtgagcctgattatcctataggcagacgtggggagggtggaggggtgacagtggaggaaaatccatggatatccacgcagcagcccctctttaacctcatctacaagcatttgccctgtggattccagcatttgccattcctggaatcaaggaatcctgagtctgggcaatgaaaccaaagccaggagttgacgcatcctgcagttgggccagctgtcgcatctcagcggggcgcacatgttatccacaagcaatggacctttggggaagggggagtttttagtttgttttacaaatttttcctgcaaaagtggaatcactgtattttcattttaatttatatttgaaattttatttagttcttgagtagatctgcttcttcatcttgacatgtaatgaatggtcagttgtacgtaatgtatttatatgttaatttgttatgtatatagatgtgcaagtcttgtcagaattggcctcagtgtagttaaagggcagaaggggaagatactgactagtcatagaaatacctcattcgcctgtgggaagagaagggaagcctcttcagggtgagtgaatggcaaagcggttgcttctccg

SEQ ID NO: 251 - protein, 99 aa, Homo Sapiens
MTSKLAVALLAAFLISAALCEGAVLPRSAKELRCQCIKTYSKPFHPKFIKELRVIESGPHCANTEIIVKLSDGRELCLDPKENWVQRVVEKFLKRAENS

SEQ ID NO: 252 - DNA, 1639 bp, Homo Sapiens
agcagagcacacaagcttctaggacaagagccaggaagaaaccaccggaaggaaccatctcactgtgtgtaaacatgacttccaagctggccgtggctctcttggcagccttcctgatttctgcagctctgtgtgaaggtgcagttttgccaaggagtgctaaagaacttagatgtcagtgcataaagacatactccaaacctttccaccccaaatttatcaaagaactgagagtgattgagagtggaccacactgcgccaacacagaaattattgtaaagctttctgatggaagagagctctgtctggaccccaaggaaaactgggtgcagagggttgtggagaagtttttgaagagggctgagaattcataaaaaaattcattctctgtggtatccaagaatcagtgaagatgccagtgaaacttcaagcaaatctacttcaacacttcatgtattgtgtgggtctgttgtagggttgccagatgcaatacaagattcctggttaaatttgaatttcagtaaacaatgaatagtttttcattgtaccatgaaatatccagaacatacttatatgtaaagtattatttatttgaatctacaaaaaacaacaaataatttttaaatataaggattttcctagatattgcacgggagaatatacaaatagcaaaattgagccaagggccaagagaatatccgaactttaatttcaggaattgaatgggtttgctagaatgtgatatttgaagcatcacataaaaatgatgggacaataaattttgccataaagtcaaatttagctggaaatcctggatttttttctgttaaatctggcaaccctagtctgctagccaggatccacaagtccttgttccactgtgccttggtttctcctttatttctaagtggaaaaagtattagccaccatcttacctcacagtgatgttgtgaggacatgtggaagcactttaagttttttcatcataacataaattattttcaagtgtaacttattaacctatttattatttatgtatttatttaagcatcaaatatttgtgcaagaatttggaaaaatagaagatgaatcattgattgaatagttataaagatgttatagtaaatttattttattttagatattaaatgatgttttattagataaatttcaatcagggtttttagattaaacaaagaaacaattgggtacccagttaaattttcatttcagataaacaacaaataattttttagtataagtacattattgtttatctgaaagttttaattgaactaacaatcctagtttgatactcccagtcttgtcattgccagctgtgttggtagtgctgtgttgaattacggaataatgagttagaactattaaaacagccaaaactccacagtcaatattagtaatttcttgctggttgaaacttgtttattatgtacaaatagattcttataatattatttaaatgactgcatttttaaatacaaggctttatatttttaactttaagatgtttttatgtgctctccaaattttttttactgtttctgattgtatggaaatataaaagtaaatatgaaacatttaaaatataatttgttgtcaaagtaaaaaaaaaaaaaaa

SEQ ID NO: 253 - protein, 335 aa, Homo Sapiens
MGKVKVGVNGFGRIGRLVTRAAFNSGKVDIVAINDPFIDLNYMVYMFQYDSTHGKFHGTVKAENGKLVINGNPITIFQERDPSKIKWGDAGAEYVVESTGVFTTMEKAGAHLQGGAKRVIISAPSADAPMFVMGVNHEKYDNSLKIISNASCTTNCLAPLAKVIHDNFGIVEGLMTTVHAITATQKTVDGPSGKLWRDGRGALQNIIPASTGAAKAVGKVIPELNGKLTGMAFRVPTANVSVVDLTCRLEKPAKYDDIKKVVKQASEGPLKGILGYTEHQVVSSDFNSDTHSSTFDAGAGIALNDHFVKLISWYDNEFGYSNRVVDLMAHMASKE

SEQ ID NO: 254 - DNA, 1283 bp, Homo Sapiens
ctctctgctcctcctgttcgacagtcagccgcatcttcttttgcgtcgccagccgagccacatcgctcagacaccatggggaaggtgaaggtcggagtcaacggatttggtcgtattgggcgcctggtcaccagggctgcttttaactctggtaaagtggatattgttgccatcaatgaccccttcattgacctcaactacatggtttacatgttccaatatgattccacccatggcaaattccatggcaccgtcaaggctgagaacgggaagcttgtcatcaatggaaatcccatcaccatcttccaggagcgagatccctccaaaatcaagtggggcgatgctggcgctgagtacgtcgtggagtccactggcgtcttcaccaccatggagaaggctggggctcatttgcaggggggagccaaaagggtcatcatctctgccccctctgctgatgcccccatgttcgtcatgggtgtgaaccatgagaagtatgacaacagcctcaagatcatcagcaatgcctcctgcaccaccaactgcttagcacccctggccaaggtcatccatgacaactttggtatcgtggaaggactcatgaccacagtccatgccatcactgccacccagaagactgtggatggcccctccgggaaactgtggcgtgatggccgcggggctctccagaacatcatccctgcctctactggcgctgccaaggctgtgggcaaggtcatccctgagctgaacgggaagctcactggcatggccttccgtgtccccactgccaacgtgtcagtggtggacctgacctgccgtctagaaaaacctgccaaatatgatgacatcaagaaggtggtgaagcaggcgtcggagggccccctcaagggcatcctgggctacactgagcaccaggtggtctcctctgacttcaacagcgacacccactcctccacctttgacgctggggctggcattgccctcaacgaccactttgtcaagctcatttcctggtatgacaacgaatttggctacagcaacagggtggtggacctcatggcccacatggcctccaaggagtaagacccctggaccaccagccccagcaagagcacaagaggaagagagagaccctcactgctggggagtccctgccacactcagtcccccaccacactgaatctcccctcctcacagttgccatgtagaccccttgaagaggggaggggcctagggagccgcaccttgtcatgtaccatcaataaagtaccctgtgctcaacc

SEQ ID NO: 255 - protein, 417 aa, Homo Sapiens
MSLSNKLTLDKLDVKGKRVVMRVDFNVPMKNNQITNNQRIKAAVPSIKFCLDNGAKSVVLMSHLGRPDGVPMPDKYSLEPVAVELKSLLGKDVLFLKDCVGPEVEKACANPAAGSVILLENLRFHVEEEGKGKDASGNKVKAEPAKIEAFRASLSKLGDVYVNDAFGTAHRAHSSMVGVNLPQKAGGFLMKKELNYFAKALESPERPFLAILGGAKVADKIQLINNMLDKVNEMIIGGGMAFTFLKVLNNMEIGTSLFDEEGAKIVKDLMSKAEKNGVKITLPVDFVTADKFDENAKTGQATVASGIPAGWMGLDCGPESSKKYAEAVTRAKQIVWNGPVGVFEWEAFARGTKALMDEVVKATSRGCITIIGGGDTATCCAKWNTEDKVSHVSTGGGASLELLEGKVLPGVDALSNI

SEQ ID NO: 256 - DNA, 1767 bp, Homo Sapiens
aagcctccggagcgcacgtcggcagtcggctccctcgttgaccgaatcaccgacctctctccccagctgtatttccaaaatgtcgctttctaacaagctgacgctggacaagctggacgttaaagggaagcgggtcgttatgagagtcgacttcaatgttcctatgaagaacaaccagataacaaacaaccagaggattaaggctgctgtcccaagcatcaaattctgcttggacaatggagccaagtcggtagtccttatgagccacctaggccggcctgatggtgtgcccatgcctgacaagtactccttagagccagttgctgtagaactcaaatctctgctgggcaaggatgttctgttcttgaaggactgtgtaggcccagaagtggagaaagcctgtgccaacccagctgctgggtctgtcatcctgctggagaacctccgctttcatgtggaggaagaagggaagggaaaagatgcttctgggaacaaggttaaagccgagccagccaaaatagaagctttccgagcttcactttccaagctaggggatgtctatgtcaatgatgcttttggcactgctcacagagcccacagctccatggtaggagtcaatctgccacagaaggctggtgggtttttgatgaagaaggagctgaactactttgcaaaggccttggagagcccagagcgacccttcctggccatcctgggcggagctaaagttgcagacaagatccagctcatcaataatatgctggacaaagtcaatgagatgattattggtggtggaatggcttttaccttccttaaggtgctcaacaacatggagattggcacttctctgtttgatgaagagggagccaagattgtcaaagacctaatgtccaaagctgagaagaatggtgtgaagattaccttgcctgttgactttgtcactgctgacaagtttgatgagaatgccaagactggccaagccactgtggcttctggcatacctgctggctggatgggcttggactgtggtcctgaaagcagcaagaagtatgctgaggctgtcactcgggctaagcagattgtgtggaatggtcctgtgggggtatttgaatgggaagcttttgcccggggaaccaaagctctcatggatgaggtggtgaaagccacttctaggggctgcatcaccatcataggtggtggagacactgccacttgctgtgccaaatggaacacggaggataaagtcagccatgtgagcactgggggtggtgccagtttggagctcctggaaggtaaagtccttcctggggtggatgctctcagcaatatttagtactttcctgccttttagttcctgtgcacagcccctaagtcaacttagcattttctgcatctccacttggcattagctaaaaccttccatgtcaagattcagctagtggccaagagatgcagtgccaggaacccttaaacagttgcacagcatctcagctcatcttcactgcaccctggatttgcatacattcttcaagatcccatttgaattttttagtgactaaaccattgtgcattctagagtgcatatatttatattttgcctgttaaaaagaaagtgagcagtgttagcttagttctcttttgatgtaggttattatgattagctttgtcactgtttcactactcagcatggaaacaagatgaaattccatttgtaggtagtgagacaaaattgatgatccattaagtaaacaataaaagtgtccattg

SEQ ID NO: 257 - protein, 434 aa, Homo Sapiens
MSILKIHAREIFDSRGNPTVEVDLFTSKGLFRAAVPSGASTGIYEALELRDNDKTRYMGKGVSKAVEHINKTIAPALVSKKLNVTEQEKIDKLMIEMDGTENKSKFGANAILGVSLAVCKAGAVEKGVPLYRHIADLAGNSEVILPVPAFNVINGGSHAGNKLAMQEFMILPVGAANFREAMRIGAEVYHNLKNVIKEKYGKDATNVGDEGGFAPNILENKEGLELLKTAIGKAGYTDKVVIGMDVAASEFFRSGKYDLDFKSPDDPSRYISPDQLADLYKSFIKDYPVVSIEDPFDQDDWGAWQKFTASAGIQVVGDDLTVTNPKRIAKAVNEKSCNCLLLKVNQIGSVTESLQACKLAQANGWGVMVSHRSGETEDTFIADLVVGLCTGQIKTGAPCRSERLAKYNQLLRIEEELGSKAKFAGRNFRNPLAK

SEQ ID NO: 258 - DNA, 1812 bp, Homo Sapiens
tagctaggcaggaagtcggcgcgggcggcgcggacagtatctgtgggtacccggagcacggagatctcgccggctttacgttcacctcggtgtctgcagcaccctccgcttcctctcctaggcgacgagacccagtggctagaagttcaccatgtctattctcaagatccatgccagggagatctttgactctcgcgggaatcccactgttgaggttgatctcttcacctcaaaaggtctcttcagagctgctgtgcccagtggtgcttcaactggtatctatgaggccctagagctccgggacaatgataagactcgctatatggggaagggtgtctcaaaggctgttgagcacatcaataaaactattgcgcctgccctggttagcaagaaactgaacgtcacagaacaagagaagattgacaaactgatgatcgagatggatggaacagaaaataaatctaagtttggtgcgaacgccattctgggggtgtcccttgccgtctgcaaagctggtgccgttgagaagggggtccccctgtaccgccacatcgctgacttggctggcaactctgaagtcatcctgccagtcccggcgttcaatgtcatcaatggcggttctcatgctggcaacaagctggccatgcaggagttcatgatcctcccagtcggtgcagcaaacttcagggaagccatgcgcattggagcagaggtttaccacaacctgaagaatgtcatcaaggagaaatatgggaaagatgccaccaatgtgggggatgaaggcgggtttgctcccaacatcctggagaataaagaaggcctggagctgctgaagactgctattgggaaagctggctacactgataaggtggtcatcggcatggacgtagcggcctccgagttcttcaggtctgggaagtatgacctggacttcaagtctcccgatgaccccagcaggtacatctcgcctgaccagctggctgacctgtacaagtccttcatcaaggactacccagtggtgtctatcgaagatccctttgaccaggatgactggggagcttggcagaagttcacagccagtgcaggaatccaggtagtgggggatgatctcacagtgaccaacccaaagaggatcgccaaggccgtgaacgagaagtcctgcaactgcctcctgctcaaagtcaaccagattggctccgtgaccgagtctcttcaggcgtgcaagctggcccaggccaatggttggggcgtcatggtgtctcatcgttcgggggagactgaagataccttcatcgctgacctggttgtggggctgtgcactgggcagatcaagactggtgccccttgccgatctgagcgcttggccaagtacaaccagctcctcagaattgaagaggagctgggcagcaaggctaagtttgccggcaggaacttcagaaaccccttggccaagtaagctgtgggcaggcaagcccttcggtcacctgttggctacacagacccctcccctcgtgtcagctcaggcagctcgaggcccccgaccaacacttgcaggggtccctgctagttagcgccccaccgccgtggagttcgtaccgcttccttagaacttctacagaagccaagctccctggagccctgttggcagctctagctttgcagtcgtgtaattggcccaagtcattgtttttctcgcctcactttccaccaagtgtctagagtcatgtgagcctcgtgtcatctccggggtggccacaggctagatccccggtggttttgtgctcaaaataaaaagcctcagtgacccatgag

SEQ ID NO: 259 - protein, 364 aa, Homo Sapiens
MPHSYPALSAEQKKELSDIALRIVAPGKGILAADESVGSMAKRLSQIGVENTEENRRLYRQVLFSADDRVKKCIGGVIFFHETLYQKDDNGVPFVRTIQDKGIVVGIKVDKGVVPLAGTDGETTTQGLDGLSERCAQYKKDGADFAKWRCVLKISERTPSALAILENANVLARYASICQQNGIVPIVEPEILPDGDHDLKRCQYVTEKVLAAVYKALSDHHVYLEGTLLKPNMVTPGHACPIKYTPEEIAMATVTALRRTVPPAVPGVTFLSGGQSEEEASFNLNAINRCPLPRPWALTFSYGRALQASALNAWRGQRDNAGAATEEFIKRAEVNGLAAQGKYEGSGEDGGAAAQSLYIANHAY

SEQ ID NO: 260 - DNA, 1582 bp, Homo Sapiens
ccgagctgtgcttgtggctgcggctgctaactggctgcgcacagggagctgtcaccatgcctcactcgtacccagccctttctgctgagcagaagaaggagttgtctgacattgccctgcggattgtagccccgggcaaaggcattctggctgcggatgagtctgtaggcagcatggccaagcggctgagccaaattggggtggaaaacacagaggagaaccgccggctgtaccgccaggtcctgttcagtgctgatgaccgtgtgaaaaagtgcattggaggcgtcattttcttccatgagaccctctaccagaaagatgataatggtgttcccttcgtccgaaccatccaggataagggcatcgtcgtgggcatcaaggttgacaagggtgtggtgcctctagctgggactgatggagaaaccaccactcaagggctggatgggctctcagaacgctgtgcccaatacaagaaggatggtgctgactttgccaagtggcgctgtgtgctgaaaatcagtgagcgtacaccctctgcacttgccattctggagaacgccaacgtgctggcccgttatgccagtatctgccagcagaatggcattgtgcctattgtggaacctgaaatattgcctgatggagaccacgacctcaaacgttgtcagtatgttacagagaaggtcttggctgctgtgtacaaggccctgagtgaccatcatgtatacctggaggggaccctgctcaagcccaacatggtgaccccgggccatgcctgtcccatcaagtataccccagaggagattgccatggcaactgtcactgccctgcgtcgcactgtgcccccagctgtcccaggagtgaccttcctgtctgggggtcagagcgaagaagaggcatcattcaacctcaatgccatcaaccgctgcccccttccccgaccctgggcgcttaccttctcctatgggcgtgccctgcaagcctctgcactcaatgcctggcgagggcaacgggacaatgctggggctgccactgaggagttcatcaagcgggctgaggtgaatgggcttgcagcccagggcaagtatgaaggcagtggagaagatggtggagcagcagcacagtcactctacattgccaaccatgcctactgagtatccactccataccacagcccttggcccagccatctgcacccacttttgcttgtagtcatggccagggccaaatagctatgcagagcagagatgccttcacctggcaccaacttgtcttcctttctctcttcccttcccctctctcattgctgcacctgggaccataggatgggaggatagggagcccctcatgactgagggcagaagaaattgctagaagtcagaacaggatggctgggtctccccctacctcttccagctcccacaattttcccatgatgaggtagcttctccctgggctctccttcttgcctgccctgtctcctgggatcagagggtagtacagaagccctgactcatgccttgagtacataccatacagcaaataaatggtagcaaaacaaaaaaaaaaaaaaaaaaaaaaaaaa

SEQ ID NO: 261 - protein, 249 aa, Homo Sapiens
MAPSRKFFVGGNWKMNGRKQSLGELIGTLNAAKVPADTEVVCAPPTAYIDFARQKLDPKIAVAAQNCYKVTNGAFTGEISPGMIKDCGATWVVLGHSERRHVFGESDELIGQKVAHALAEGLGVIACIGEKLDEREAGITEKVVFEQTKVIADNVKDWSKVVLAYEPVWAIGTGKTATPQQAQEVHEKLRGWLKSNVSDAVAQSTRIIYGGSVTGATCKELASQPDVDGFLVGGASLKPEFVDIINAKQ

SEQ ID NO: 262 - DNA, 1229 bp, Homo Sapiens
gcgcgacactgaccttcagcgcctcggctcggccatggcgccctccaggaagttcttcgttgggggaaactggaagatgaacgggcggaagcagagtctgggggagctcatcggcactctgaacgcggccaaggtgccggccgacaccgaggtggtttgtgctccccctactgcctatatcgacttcgcccggcagaagctagatcccaagattgctgtggctgcgcagaactgctacaaagtgactaatggggcttttactggggagatcagccctggcatgatcaaagactgcggagccacgtgggtggtcctgggacactcagagagaaggcatgtctttggggagtcagatgagctgattgggcagaaagtggcccatgctctggcagagggactcggagtaatcgcctgcattggggagaagctagatgaaagggaagctggcatcactgagaaggttgttttcgagcagacaaaggtcatcgcagataacgtgaaggactggagcaaggtcgtcctcgcctatgagcctgtgtgggccattggtactggcaagactgcaacaccccaacaggcccaggaagtacacgagaagctccgaggatggctgaagtccaacgtctctgatgcggtggctcagagcacccgtatcatttatggaggctctgtgactggggcaacctgcaaggagctggccagccagcctgatgtggatggcttccttgtgggtggtgcttccctcaagcccgaattcgtggacatcatcaatgccaaacaatgagccccatccatcttccctacccttcctgccaagccagggactaagcagcccagaagcccagtaactgccctttccctgcatatgcttctgatggtgtcatctgctccttcctgtggcctcatccaaactgtatcttcctttactgtttatatcttcaccctgtaatggttgggaccaggccaatcccttctccacttactataatggttggaactaaacgtcaccaaggtggcttctccttggctgagagatggaaggcgtggtgggatttgctcctgggttccctaggccctagtgagggcagaagagaaaccatcctctcccttcttacaccgtgaggccaagatcccctcagaaggcaggagtgctgccctctcccatggtgcccgtgcctctgtgctgtgtatgtgaaccacccatgtgagggaataaacctagcactagg

SEQ ID NO: 263 - protein, 223 aa, Homo Sapiens; identical to SEQ ID NO: 77

SEQ ID NO: 264 - DNA, 1707 bp, Homo Sapiens; identical to SEQ ID NO: 78

SEQ ID NO: 265 - protein, 61 aa, Homo Sapiens
MDPNCSCAAGDSCTCAGSCKCKECKCTSCKKSCCSCCPVGCAKCAQGCICKGASDKCSCCA

SEQ ID NO: 266 - DNA, 186 bp, Homo Sapiens
atggatcccaactgctcctgcgccgccggtgactcctgcacctgcgccggctcctgcaaatgcaaagagtgcaaatgcacctcctgcaagaaaagctgctgctcctgctgccctgtgggctgtgccaagtgtgcccagggctgcatctgcaaaggggcgtcggacaagtgcagctgctgcgcctga

SEQ ID NO: 267 - protein, 300 aa, Homo Sapiens
MRIAVICFCLLGITCAIPVKQADSGSSEEKQLYNKYPDAVATWLNPDPSQKQNLLAPQTLPSKSNESHDHMDDMDDEDDDDHVDSQDSIDSNDSDDVDDTDDSHQSDESHHSDESDELVTDFPTDLPATEVFTPVVPTVDTYDGRGDSVVYGLRSKSKKFRRPDIQYPDATDEDITSHMESEELNGAYKAIPVAQDLNAPSDWDSRGKDSYETSQLDDQSAETHSHKQSRLYKRKANDESNEHSDVIDSQELSKVSREFHSHEFHSHEDMLVVDPKSKEEDKHLKFRISHELDSASSEVN

SEQ ID NO: 268 - DNA, 1524 bp, Homo Sapiens
gcagagcacagcatcgtcgggaccagactcgtctcaggccagttgcagccttctcagccaaacgccgaccaaggaaaactcactaccatgagaattgcagtgatttgcttttgcctcctaggcatcacctgtgccataccagttaaacaggctgattctggaagttctgaggaaaagcagctttacaacaaatacccagatgctgtggccacatggctaaaccctgacccatctcagaagcagaatctcctagccccacagacccttccaagtaagtccaacgaaagccatgaccacatggatgatatggatgatgaagatgatgatgaccatgtggacagccaggactccattgactcgaacgactctgatgatgtagatgacactgatgattctcaccagtctgatgagtctcaccattctgatgaatctgatgaactggtcactgattttcccacggacctgccagcaaccgaagttttcactccagttgtccccacagtagacacatatgatggccgaggtgatagtgtggtttatggactgaggtcaaaatctaagaagtttcgcagacctgacatccagtaccctgatgctacagacgaggacatcacctcacacatggaaagcgaggagttgaatggtgcatacaaggccatccccgttgcccaggacctgaacgcgccttctgattgggacagccgtgggaaggacagttatgaaacgagtcagctggatgaccagagtgctgaaacccacagccacaagcagtccagattatataagcggaaagccaatgatgagagcaatgagcattccgatgtgattgatagtcaggaactttccaaagtcagccgtgaattccacagccatgaatttcacagccatgaagatatgctggttgtagaccccaaaagtaaggaagaagataaacacctgaaatttcgtatttctcatgaattagatagtgcatcttctgaggtcaattaaaaggagaaaaaatacaatttctcactttgcatttagtcaaaagaaaaaatgctttatagcaaaatgaaagagaacatgaaatgcttctttctcagtttattggttgaatgtgtatctatttgagtctggaaataactaatgtgtttgataattagtttagtttgtggcttcatggaaactccctgtaaactaaaagcttcagggttatgtctatgttcattctatagaagaaatgcaaactatcactgtattttaatatttgttattctctcatgaatagaaatttatgtagaagcaaacaaaatacttttacccacttaaaaagagaatataacattttatgtcactataatcttttgttttttaagttagtgtatattttgttgtgattatctttttgtggtgtgaataaatcttttatcttgaatgtaataagaatttggtggtgtcaattgcttatttgttttcccacggttgtccagcaattaataaaacataaccttttttactgcctaaaaaaaaaaaaaaaaaaaa

SEQ ID NO: 269 - protein, 593 aa, Homo Sapiens
MWTLVSWVALTAGLVAGTRCPDGQFCPVACCLDPGGASYSCCRPLLDKWPTTLSRHLGGPCQVDAHCSAGHSCIFTVSGTSSCCPFPEAVACGDGHHCCPRGFHCSADGRSCFQRSGNNSVGAIQCPDSQFECPDFSTCCVMVDGSWGCCPMPQASCCEDRVHCCPHGAFCDLVHTRCITPTGTHPLAKKLPAQRTNRAVALSSSVMCPDARSRCPDGSTCCELPSGKYGCCPMPNATCCSDHLHCCPQDTVCDLIQSKCLSKENATTDLLTKLPAHTVGDVKCDMEVSCPDGYTCCRLQSGAWGCCPFTQAVCCEDHIHCCPAGFTCDTQKGTCEQGPHQVPWMEKAPAHLSLPDPQALKRDVPCDNVSSCPSSDTCCQLTSGEWGCCPIPEAVCCSDHQHCCPQGYTCVAEGQCQRGSEIVAGLEKMPARRASLSHPRDIGCDQHTSCPVGQTCCPSLGGSWACCQLPHAVCCEDRQHCCPAGYTCNVKARSCEKEVVSAQPATFLARSPHVGVKDVECGEGHFCHDNQTCCRDNRQGWACCPYRQGVCCADRRHCCPAGFRCAARGTKCLRREAPRWDAPLRDPALRQLL

SEQ ID NO: 270 - DNA, 2178 bp, Homo Sapiens
gtagtctgagcgctacccggttgctgctgcccaaggaccgcggagtcggacgcaggcagaccatgtggaccctggtgagctgggtggccttaacagcagggctggtggctggaacgcggtgcccagatggtcagttctgccctgtggcctgctgcctggaccccggaggagccagctacagctgctgccgtccccttctggacaaatggcccacaacactgagcaggcatctgggtggcccctgccaggttgatgcccactgctctgccggccactcctgcatctttaccgtctcagggacttccagttgctgccccttcccagaggccgtggcatgcggggatggccatcactgctgcccacggggcttccactgcagtgcagacgggcgatcctgcttccaaagatcaggtaacaactccgtgggtgccatccagtgccctgatagtcagttcgaatgcccggacttctccacgtgctgtgttatggtcgatggctcctgggggtgctgccccatgccccaggcttcctgctgtgaagacagggtgcactgctgtccgcacggtgccttctgcgacctggttcacacccgctgcatcacacccacgggcacccaccccctggcaaagaagctccctgcccagaggactaacagggcagtggccttgtccagctcggtcatgtgtccggacgcacggtcccggtgccctgatggttctacctgctgtgagctgcccagtgggaagtatggctgctgcccaatgcccaacgccacctgctgctccgatcacctgcactgctgcccccaagacactgtgtgtgacctgatccagagtaagtgcctctccaaggagaacgctaccacggacctcctcactaagctgcctgcgcacacagtgggggatgtgaaatgtgacatggaggtgagctgcccagatggctatacctgctgccgtctacagtcgggggcctggggctgctgcccttttacccaggctgtgtgctgtgaggaccacatacactgctgtcccgcggggtttacgtgtgacacgcagaagggtacctgtgaacaggggccccaccaggtgccctggatggagaaggccccagctcacctcagcctgccagacccacaagccttgaagagagatgtcccctgtgataatgtcagcagctgtccctcctccgatacctgctgccaactcacgtctggggagtggggctgctgtccaatcccagaggctgtctgctgctcggaccaccagcactgctgcccccagggctacacgtgtgtagctgaggggcagtgtcagcgaggaagcgagatcgtggctggactggagaagatgcctgcccgccgggcttccttatcccaccccagagacatcggctgtgaccagcacaccagctgcccggtggggcagacctgctgcccgagcctgggtgggagctgggcctgctgccagttgccccatgctgtgtgctgcgaggatcgccagcactgctgcccggctggctacacctgcaacgtgaaggctcgatcctgcgagaaggaagtggtctctgcccagcctgccaccttcctggcccgtagccctcacgtgggtgtgaaggacgtggagtgtggggaaggacacttctgccatgataaccagacctgctgccgagacaaccgacagggctgggcctgctgtccctaccgccagggcgtctgttgtgctgatcggcgccactgctgtcctgctggcttccgctgcgcagccaggggtaccaagtgtttgcgcagggaggccccgcgctgggacgcccctttgagggacccagccttgagacagctgctgtgagggacagtactgaagactctgcagccctcgggaccccactcggagggtgccctctgctcaggcctccctagcacctccccctaaccaaattctccctggaccccattctgagctccccatcaccatgggaggtggggcctcaatctaaggccttccctgtcagaagggggttgtggcaaaagccacattacaagctgccatcccctccccgtttcagtggaccctgtggccaggtgcttttccctatccacaggggtgtttgtgtgtgtgcgcgtgtgcgtttcaataaagtttgtacactttcaaaaaaaaaaaaaaaaaaaaaaaaaaaaaa

SEQ ID NO: 271 - protein, 63 aa, Homo Sapiens
MKHVLNLYLLGVVLTLLSIFVRVMESLEGLLESPSPGTSWTTRSQLANTEPTKGLPDHPSRSM

SEQ ID NO: 272 - DNA, 1372 bp, Homo Sapiens
gcacgagggcgcttttgtctccggtgagttttgtggcgggaagcttctgcgctggtgcttagtaaccgactttcctccggactcctgcacgacctgctcctacagccggcgatccactcccggctgttcccccggagggtccagaggcctttcagaaggagaaggcagctctgtttctctgcagaggagtagggtcctttcagccatgaagcatgtgttgaacctctacctgttaggtgtggtactgaccctactctccatcttcgttagagtgatggagtccctagaaggcttactagagagcccatcgcctgggacctcctggaccaccagaagccaactagccaacacagagcccaccaagggccttccagaccatccatccagaagcatgtgataagacctccttccatactggccatattttggaacactgacctagacatgtccagatgggagtcccattcctagcagacaagctgagcaccgttgtaaccagagaactattactaggccttgaagaacctgtctaactggatgctcattgcctgggcaaggcctgtttaggccggttgcggtggctcatgcctgtaatcctagcactttgggaggctgaggtgggtggatcacctgaggtcaggagttcgagaccagcctcgccaacatggcgaaaccccatctctactaaaaatacaaaagttagctgggtgtggtggcagaggcctgtaatcccagttccttgggaggctgaggcgggagaattgcttgaacccggggacggaggttgcagtgaaccgagatcgcactgctgtacccagcctgggccacagtgcaagactccatctcaaaaaaaaaaagaaaagaaaaagcctgtttaatgcacaggtgtgagtggattgcttatggctatgagataggttgatctcgcccttaccccggggtctggtgtatgctgtgctttcctcagcagtatggctctgacatctcttagatgtcccaacttcagctgttgggagatggtgatattttcaaccctacttcctaaacatctgtctggggttcctttagtcttgaatgtcttatgctcaattatttggtgttgagcctctcttccacaagagctcctccatgtttggatagcagttgaagaggttgtgtgggtgggctgttgggagtgaggatggagtgttcagtgcccatttctcattttacattttaaagtcgttcctccaacatagtgtgtattggtctgaagggggtggtgggatgccaaagcctgctcaagttatggacattgtggccaccatgtggcttaaatgattttttctaactaataaagtggaatatatatttcaaaaaaaaaaaaaaaaaa

SEQ ID NO: 273 - protein, 434 aa, Homo Sapiens
MSIEKIWAREILDSRGNPTVEVDLYTAKGLFRAAVPSGASTGIYEALELRDGDKQRYLGKGVLKAVDHINSTIAPALISSGLSVVEQEKLDNLMLELDGTENKSKFGANAILGVSLAVCKAGAAERELPLYRHIAQLAGNSDLILPVPAFNVINGGSHAGNKLAMQEFMILPVGAESFRDAMRLGAEVYHTLKGVIKDKYGKDATNVGDEGGFAPNILENSEALELVKEAIDKAGYTEKIVIGMDVAASEFYRDGKYDLDFKSPTDPSRYITGDQLGALYQDFVRDYPVVSIEDPFDQDDWAAWSKFTANVGIQIVGDDLTVTNPKRIERAVEEKACNCLLLKVNQIGSVTEAIQACKLAQENGWGVMVSHRSGETEDTFIADLVVGLCTGQIKTGAPCRSERLAKYNQLMRIEEELGDEARFAGHNFRNPSVL

SEQ ID NO: 274 - DNA, 2423 bp, Homo Sapiens
acccgcgctcgtacgtgcgcctccgccggcagctcctgactcatcgggggctccgggtcacatgcgcccgcgcggccctataggcgcctcctccgcccgccgcccgggagccgcagccgccgccgccactgccactcccgctctctcagcgccgccgtcgccaccgccaccgccaccgccactaccaccgtctgagtctgcagtcccgagatcccagccatcatgtccatagagaagatctgggcccgggagatcctggactcccgcgggaaccccacagtggaggtggatctctatactgccaaaggtcttttccgggctgcagtgcccagtggagcctctacgggcatctatgaggccctggagctgagggatggagacaaacagcgttacttaggcaaaggtgtcctgaaggcagtggaccacatcaactccaccatcgcgccagccctcatcagctcaggtctctctgtggtggagcaagagaaactggacaacctgatgctggagttggatgggactgagaacaaatccaagtttggggccaatgccatcctgggtgtgtctctggccgtgtgtaaggcaggggcagctgagcgggaactgcccctgtatcgccacattgctcagctggccgggaactcagacctcatcctgcctgtgccggccttcaacgtgatcaatggtggctctcatgctggcaacaagctggccatgcaggagttcatgatcctcccagtgggagctgagagctttcgggatgccatgcgactaggtgcagaggtctaccatacactcaagggagtcatcaaggacaaatacggcaaggatgccaccaatgtgggggatgaaggtggctttgcccccaatatcctggagaacagtgaagccttggagctggtgaaggaagccatcgacaaggctggctacacggaaaagatcgttattggcatggatgttgctgcctcagagttttatcgtgatggcaaatatgacttggacttcaagtctcccactgatccttcccgatacatcactggggaccagctgggggcactctaccaggactttgtcagggactatcctgtggtctccattgaggacccatttgaccaggatgattgggctgcctggtccaagttcacagccaatgtagggatccagattgtgggtgatgacctgacagtgaccaacccaaaacgtattgagcgggcagtggaagaaaaggcctgcaactgtctgctgctcaaggtcaaccagatcggctcggtcactgaagccatccaagcgtgcaagctggcccaggagaatggctggggggtcatggtgagtcatcgctcaggagagactgaggacacattcattgctgacctggtggtggggctgtgcacaggccagatcaagactggtgccccgtgccgttctgaacgtctggctaaatacaaccagctcatgagaattgaggaagagctgggggatgaagctcgctttgccggacataacttccgtaatcccagtgtgctgtgattcctctgcttgcctggagacgtggaacctctgtctcatcctcctggaaccttgctgtcctgatctgtgatagttcaccccctgagatcccctgagccccagggtgcccagaacttccctgattgacctgctccgctgctccttggcttacctgacctcttgctgtctctgctcgccctcctttctgtgccctactcattggggttccgcactttccacttcttcctttctctttctctcttccctcagaaactagaaatgtgaatgaggattattataaaagggggtccgtggaagaatgatcagcatctgtgatgggagcgtcagggttggtgtgctgaggtgttagagagggaccatgtgtcacttgtgctttgctcttgtcccacgtgtcttccactttgcatatgagccgtgaactgtgcatagtgctgggatggaggggagtgttgggcatgtgatcacgcctggctaataaggctttagtgtatttatttatttatttattttatttgtttttcattcatcccattaatcatttccccataactcaatggcctaaaactggcctgacttgggggaacgatgtgtctgtatttcatgtggctgtagatcccaagatgactggggtgggaggtcttgctagaatgggaagggtcatagaaagggccttgacatcagttcctttgtgtgtactcactgaagcctgcgttggtccagagcggaggctgtgtgcctgggggagttttcctctatacatctctccccaaccctaggttccctgttcttcctccagctgcaccagagcaacctctcactccccatgccacgttccacagttgccaccacctctgtggcattgaaatgagcacctccattaaagtctgaatcagtgc

SEQ ID NO: 275 - protein, 737 aa, Homo Sapiens
MPLNRTLSMSSLPGLEDWEDEFDLENAVLFEVAWEVANKVGGIYTVLQTKAKVTGDEWGDNYFLVGPYTEQGVRTQVELLEAPTPALKRTLDSMNSKGCKVYFGRWLIEGGPLVVLLDVGASAWALERWKGELWDICNIGVPWYDREANDAVLFGFLTTWFLGEFLAQSEEKPHVVAHFHEWLAGVGLCLCRARRLPVATIFTTHATLLGRYLCAGAVDFYNNLENFNVDKEAGERQIYHRYCMERAAAHCAHVFTTVSQITAIEAQHLLKRKPDIVTPNGLNVKKFSAMHEFQNLHAQSKARIQEFVRGHFYGHLDFNLDKTLYFFIAGRYEFSNKGADVFLEALARLNYLLRVNGSEQTVVAFFIMPARTNNFNVETLKGQAVRKQLWDTANTVKEKFGRKLYESLLVGSLPDMNKMLDKEDFTMMKRAIFATQRQSFPPVCTHNMLDDSSDPILTTIRRIGLFNSSADRVKVIFHPEFLSSTSPLLPVDYEEFVRGCHLGVFPSYYEPWGYTPAECTVMGIPSISTNLSGFGCFMEEHIADPSAYGIYILDRRFRSLDDSCSQLTSFLYSFCQQSRRQRIIQRNRTERLSDLLDWKYLGRYYMSARHMALSKAFPEHFTYEPNEADAAQGYRYPRPASVPPSPSLSRHSSPHQSEDEEDPRNGPLEEDGERYDEDEEAAKDRRNIRAPEWPRRASCTSSTSGRKRNSVDTATSSSLSTPSEPLSPTSSLGEERN

SEQ ID NO: 276 - DNA, 3531 bp, Homo Sapiens
cgcttcgggcaggggtgcggtcttgcaataggaagccgagcgtcttgcaagcttcccgtcggcaccagctactcggccccgcaccctacctggtgcattccctagacacctccggggtccctacctggagatccccggagccccccttcctgcgccagccatgcctttaaaccgcactttgtccatgtcctcactgccaggactggaggactgggaggatgaattcgacctggagaacgcagtgctcttcgaagtggcctgggaggtggctaacaaggtgggtggcatctacacggtgctgcagacgaaggcgaaggtgacaggggacgaatggggcgacaactacttcctggtggggccgtacacggagcagggcgtcaggacccaggtggaactgctggaggcccccaccccggccctgaagaggacactggattccatgaacagcaagggctgcaaggtgtatttcgggcgctggctgatcgagggaggccctctggtggtgctcctggacgtgggtgcctcagcttgggccctggagcgctggaagggagagctctgggatatctgcaacatcggagtgccgtggtacgaccgcgaggccaacgacgctgtcctctttggctttctgaccacctggttcctgggtgagttcctggcacagagtgaggagaagccacatgtggttgctcacttccatgagtggttggcaggcgttggactctgcctgtgtcgtgcccggcgactgcctgtagcaaccatcttcaccacccatgccacgctgctggggcgctacctgtgtgccggtgccgtggacttctacaacaacctggagaacttcaacgtggacaaggaagcaggggagaggcagatctaccaccgatactgcatggaaagggcggcagcccactgcgctcacgtcttcactactgtgtcccagatcaccgccatcgaggcacagcacttgctcaagaggaaaccagatattgtgacccccaatgggctgaatgtgaagaagttttctgccatgcatgagttccagaacctccatgctcagagcaaggctcgaatccaggagtttgtgcggggccatttttatgggcatctggacttcaacttggacaagaccttatacttctttatcgccggccgctatgagttctccaacaagggtgctgacgtctttctggaggcattggctcggctcaactatctgctcagagtgaacggcagcgagcagacagtggttgccttcttcatcatgccagcgcggaccaacaatttcaacgtggaaaccctcaaaggccaagctgtgcgcaaacagctttgggacacggccaacacggtgaaggaaaagttcgggaggaagctttatgaatccttactggttgggagccttcccgacatgaacaagatgctggataaggaagacttcactatgatgaagagagccatctttgcaacgcagcggcagtctttcccccctgtgtgcacccacaatatgctggatgactcctcagaccccatcctgaccaccatccgccgaatcggcctcttcaatagcagtgccgacagggtgaaggtgattttccacccggagttcctctcctccacaagccccctgctccctgtggactatgaggagtttgtccgtggctgtcaccttggagtcttcccctcctactatgagccttggggctacacaccggctgagtgcacggttatgggaatccccagtatctccaccaatctctccggcttcggctgcttcatggaggaacacatcgcagacccctcagcttacggtatctacattcttgaccggcggttccgcagcctggatgattcctgctcgcagctcacctccttcctctacagtttctgtcagcagagccggcggcagcgtatcatccagcggaaccgcacggagcgcctctccgaccttctggactggaaatacctaggccggtactatatgtctgcgcgccacatggcgctgtccaaggcctttccagagcacttcacctacgagcccaacgaggcggatgcggcccaggggtaccgctacccacggccagcctcggtgccaccgtcgccctcgctgtcacgacactccagcccgcaccagagtgaggacgaggaggatccccggaacgggccgctggaggaagacggcgagcgctacgatgaggacgaggaggccgccaaggaccggcgcaacatccgtgcaccagagtggccgcgccgagcgtcctgcacctcctccaccagcggccgcaagcgcaactctgtggacacggccacctccagctcactcagcaccccgagcgagcccctcagccccaccagctccctgggcgaggagcgtaactaagtccgccccaccacactccccgcctgtcctgcctctctgctccagagagaggatgcagaggggtgctgctcctaaacccccgatccagatctgcacggggtgcggccccgcagtgcccccacccagtccgccaaacactccaccccctccagctccagtttccaagttcctgcactcctgaatccacaaagccgtgcctttctctggctccagaatatgcataatcagcgccctggagtcccctgggcctggaccgcttcccagaggccaggaaatctgccattactctgcggtggtgccagaggttttaggaaacctggcatggtgctttcaggtctggggcttttagagccccccgtgtggcttacaaattctacagcatacagagcaggccacgctcaggcccggcatgcgggccaccaagttctggaaaccacgtggtgtccctgcgaatggggcgatcaagtccagagccggggcactttcagagtttgaaggtaactgagagcagatggtcctccatttcaactccagaagtggggctctgggagggatgttctagccctccctggctgtcagagccaggctctgcctggaggatccctccatccggctcctgtcatcccctacactttggccaagcaagaggtggtagaaccacttggctgctcattccttctggaggacacacagtctcagtccagatgccttcctgtctttctggtcctttctggaccagatcctactcttcctttctaaatctgagatctccctccagggaatccgcctgcagaggacagagctggctgtcttcccccacccctaacctggcttattcccaactgctctgcccactgtgaaaccactaggttctaggtcctggcttctagatctggaaccttaccacgttactgcatactgatccctttcccatgatccagaactgaggtcactgggttctagaacccccacatttacctcgaggctcttccatccccaaactgtgccctgccttcagctttggtgaaagggagggcccctcatgtgtgctgtgctgtgtctgcaccgcttggtttgcagttgagaggggagggcaggaggggtgtgattggagtgtgtccggagatgagatgaaaaaaatacatctatatttaaga

SEQ ID NO: 277 - protein, 583 aa, Homo Sapiens
MESKGASSCRLLFCLLISATVFRPGLGWYTVNSAYGDTIIIPCRLDVPQNLMFGKWKYEKPDGSPVFIAFRSSTKKSVQYDDVPEYKDRLNLSENYTLSISNARISDEKRFVCMLVTEDNVFEAPTIVKVFKQPSKPEIVSKALFLETEQLKKLGDCISEDSYPDGNITWYRNGKVLHPLEGAVVIIFKKEMDPVTQLYTMTSTLEYKTTKADIQMPFTCSVTYYGPSGQKTIHSEQAVFDIYYPTEQVTIQVLPPKNAIKEGDNITLKCLGNGNPPPEEFLFYLPGQPEGIRSSNTYTLMDVRRNATGDYKCSLIDKKSMIASTAITVHYLDLSLNPSGEVTRQIGDALPVSCTISASRNATVVWMKDNIRLRSSPSFSSLHYQDAGNYVCETALQEVEGLKKRESLTLIVEGKPQIKMTKKTDPSGLSKTIICHVEGFPKPAIQWTITGSGSVINQTEESPYINGRYYSKIIISPEENVTLTCTAENQLERTVNSLNVSAISIPEHDEADEISDENREKVNDQAKLIVGIVVGLLLAALVAGVVYWLYMKKSKTASKHVNKDLGNMEENKKLEENNHKTEA

SEQ ID NO: 278 - DNA, 2539 bp, Homo Sapiens
cgggacgacgccccctcctgcggcgtggactccgtcagtggcccaccaagaaggaggaggaatatggaatccaagggggccagttcctgccgtctgctcttctgcctcttgatctccgccaccgtcttcaggccaggccttggatggtatactgtaaattcagcatatggagataccattatcataccttgccgacttgacgtacctcagaatctcatgtttggcaaatggaaatatgaaaagcccgatggctccccagtatttattgccttcagatcctctacaaagaaaagtgtgcagtacgacgatgtaccagaatacaaagacagattgaacctctcagaaaactacactttgtctatcagtaatgcaaggatcagtgatgaaaagagatttgtgtgcatgctagtaactgaggacaacgtgtttgaggcacctacaatagtcaaggtgttcaagcaaccatctaaacctgaaattgtaagcaaagcactgtttctcgaaacagagcagctaaaaaagttgggtgactgcatttcagaagacagttatccagatggcaatatcacatggtacaggaatggaaaagtgctacatccccttgaaggagcggtggtcataatttttaaaaaggaaatggacccagtgactcagctctataccatgacttccaccctggagtacaagacaaccaaggctgacatacaaatgccattcacctgctcggtgacatattatggaccatctggccagaaaacaattcattctgaacaggcagtatttgatatttactatcctacagagcaggtgacaatacaagtgctgccaccaaaaaatgccatcaaagaaggggataacatcactcttaaatgcttagggaatggcaaccctcccccagaggaatttttgttttacttaccaggacagcccgaaggaataagaagctcaaatacttacacactgatggatgtgaggcgcaatgcaacaggagactacaagtgttccctgatagacaaaaaaagcatgattgcttcaacagccatcacagttcactatttggatttgtccttaaacccaagtggagaagtgactagacagattggtgatgccctacccgtgtcatgcacaatatctgctagcaggaatgcaactgtggtatggatgaaagataacatcaggcttcgatctagcccgtcattttctagtcttcattatcaggatgctggaaactatgtctgcgaaactgctctgcaggaggttgaaggactaaagaaaagagagtcattgactctcattgtagaaggcaaacctcaaataaaaatgacaaagaaaactgatcccagtggactatctaaaacaataatctgccatgtggaaggttttccaaagccagccattcagtggacaattactggcagtggaagcgtcataaaccaaacagaggaatctccttatattaatggcaggtattatagtaaaattatcatttcccctgaagagaatgttacattaacttgcacagcagaaaaccaactggagagaacagtaaactccttgaatgtctctgctataagtattccagaacacgatgaggcagacgagataagtgatgaaaacagagaaaaggtgaatgaccaggcaaaactaattgtgggaatcgttgttggtctcctccttgctgcccttgttgctggtgtcgtctactggctgtacatgaagaagtcaaagactgcatcaaaacatgtaaacaaggacctcggtaatatggaagaaaacaaaaagttagaagaaaacaatcacaaaactgaagcctaagagagaaactgtcctagttgtccagagataaaaatcatatagaccaattgaagcatgaacgtggattgtatttaagacataaacaaagacattgacagcaattcatggttcaagtattaagcagttcattctaccaagctgtcacaggttttcagagaattatctcaagtaaaacaaatgaaatttaattacaaacaataagaacaagttttggcagccatgataataggtcatatgttgtgtttggttcaattttttttccgtaaatgtctgcactgaggatttctttttggtttgccttttatgtaaattttttacgtagctatttttatacactgtaagctttgttctgggagttgctgttaatctgatgtataatgtaatgtttttatttcaattgtttatatggataatctgagcaggtacatttctgattctgattgctatcagcaatgccccaaactttctcataagcacctaaaacccaaaggtggcagcttgtgaagattggggacactcatattgccctaattaaaaactgtgatttttatcacaagggaggggaggccgagagtcagactgatagacaccataggagccgactctttgatatgccaccagcgaactctcagaaataaatcacagatgcatatagacacacatacataatggtactcccaaactgacaattttacctattctgaaaaagacataaaacagaatt

SEQ ID NO: 279 - protein, 228 aa, Homo Sapiens [sequence omitted]

SEQ ID NO: 280 - DNA, 2416 bp, Homo Sapiens; identical to SEQ ID NO: 120

SEQ ID NO: 281 - skipped

SEQ ID NO: 282 - DNA, 1144 bp, Homo Sapiens
atcgcaacctgggcctcagcatgctgctgcagtgatggcgccaacccgtggcagtcccagagctggaggcaggaggatggatcctcatctccatgggaagtgtcagcgtgtggctgccagggaagcgtggcaggcgcctggccttgggtccatctacatagttgcgtgtttcaacaatgtccatttatccttcaccccgaggcgtgttttgggggctgcaaacacctcccggtagaggctggacctgaggacccttcccacctgtgcccgtcccttcctgaagtcctagccacagcccatcctccatgagtcccggcagctctgggtcatgcccttccctggtcacccatctgcccctcacctcgtcatccagggacccagaccctgcaccttccatgtgggcccacagatccttggcaggtacctgaggtgcaccattgagtgtcggatttggggttagcatccagaaagaagaatgcgcatgacgctctgtgaaggctggaactcaggtcttcagggagagaaaggaagactggattgcaccttgatgcctcctgaggaggcggcccccctcttgaggtgggcgtgggcccggcccagccttatccaagtcgctctgtccacctcccccttcctggcccccaccccactcctgtgcctcccaggagccctccctgtgctccacctgcctccgcagaaggaagcctctttctctgtttccctgggtgagggggctggcaggtggctaaccccatttagcatctccaggccctgccatggtgtctcatcttgctgttatctctagctctttccctcctcccatttcctttagtagttgaattttgcaaagcttgtagcagtagctcagttgcctgcagcatccttgtgtgtagataaattagtcgacagaaactcagcactggggacaggattgcaaagtcggggacatagatgcagacagttgttgagatttggggatagccgggcttgtgagcggtgcccatttccagatgaagcctttcagcccttctgagtccccggcccttggtgcgatgtctgtgagtttgacctgcccagcgtgtgggctggctcaatgctgaataaagtgggtttgtgtcaaaaaaaaaaaaaaaaaaaaaaaaaa

SEQ ID NO: 283 - protein, 385 aa, Homo Sapiens
MDQKSLWAGVVVLLLLQGGSAYKLVCYFTNWSQDRQEPGKFTPENIDPFLCSHLIYSFASIENNKVIIKDKSEVMLYQTINSLKTKNPKLKILLSIGGYLFGSKGFHPMVDSSTSRLEFINSIILFLRNHNFDGLDVSWIYPDQKENTHFTVLIHELAEAFQKDFTKSTKERLLLTAGVSAGRQMIDNSYQVEKLAKDLDFINLLSFDFHGSWEKPLITGHNSPLSKGWQDRGPSSYYNVEYAVGYWIHKGMPSEKVVMGIPTYGHSFTLASAETTVGAPASGPGAAGPITESSGFLAYYEICQFLKGAKITRLQDQQVPYAVKGNQWVGYDDVKSMETKVQFLKNLNLGGAMIWSIDMDDFTGKSCNQGPYPLVQAVKRSLGSL

SEQ ID NO: 284 - DNA, 1418 bp, Homo Sapiens
agaagaagctggccaaggatatgggagcaaccaccatggaccagaagtctctctgggcaggtgtagtggtcttgctgcttctccagggaggatctgcctacaaactggtttgctactttaccaactggtcccaggaccggcaggaaccaggaaaattcacccctgagaatattgaccccttcctatgctctcatctcatctattcattcgccagcatcgaaaacaacaaggttatcatcaaggacaagagtgaagtgatgctctaccagaccatcaacagtctcaaaaccaagaatcccaaactgaaaattctcttgtccattggagggtacctgtttggttccaaagggttccaccctatggtggattcttctacatcacgcttggaattcattaactccataatcctgtttctgaggaaccataactttgatggactggatgtaagctggatctacccagatcagaaagaaaacactcatttcactgtgctgattcatgagttagcagaagcctttcagaaggacttcacaaaatccaccaaggaaaggcttctcttgactgcgggcgtatctgcagggaggcaaatgattgataacagctatcaagttgagaaactggcaaaagatctggatttcatcaacctcctgtcctttgacttccatgggtcttgggaaaagccccttatcactggccacaacagccctctgagcaaggggtggcaggacagagggccaagctcctactacaatgtggaatatgctgtggggtactggatacataagggaatgccatcagagaaggtggtcatgggcatccccacatatgggcactccttcacactggcctctgcagaaaccaccgtgggggcccctgcctctggccctggagctgctggacccatcacagagtcttcaggcttcctggcctattatgagatctgccagttcctgaaaggagccaagatcacgcgcctccaggatcagcaggttccctacgcagtcaaggggaaccagtgggtgggctatgatgatgtgaagagtatggagaccaaggttcagttcttaaagaatttaaacctgggaggagccatgatctggtctattgacatggatgacttcactggcaaatcctgcaaccagggcccttaccctcttgtccaagcagtcaagagaagccttggctccttgtgaaggattaacttacagagaagcaggcaagatgaccttgctgcctggggcctgctctctcccaggaattctcatgtgggattccccttgccaggctggcctttggatctctcttccaagcctttcctgacttcctcttagatcatagattggacctggttttgttttcctgcagctgttgacttgttgccctgaagtacaataaaaaaaattcattttgctccagta

SEQ ID NO: 285 - protein, 736 aa, Homo Sapiens
MSLSENSVFAYESSVHSTNVLLSLNDQRKKDVLCDVTIFVEGQRFRAHRSVLAACSSYFHSRIVGQADGELNITLPEEVTVKGFEPLIQFAYTAKLILSKENVDEVCKCVEFLSVHNIEESCFQFLKFKFLDSTADQQECPRKKCFSSHCQKTDLKLSLLDQRDLETDEVEEFLENKNVQTPQCKLRRYQGNAKASPPLQDSASQTYESMCLEKDAALALPSLCPKYRKFQKAFGTDRVRTGESSVKDIHASVQPNERSENECLGGVPECRDLQVMLKCDESKLAMEPEETKKDPASQCPTEKSEVTPFPHNSSIDPHGLYSLSLLHTYDQYGDLNFAGMQNTTVLTEKPLSGTDVQEKTFGESQDLPLKSDLGTREDSSVASSDRSSVEREVAEHLAKGFWSDICSTDTPCQMQLSPAVAKDGSEQISQKRSECPWLGIRISESPEPGQRTFTTLSSVNCPFISTLSTEGCSSNLEIGNDDYVSEPQQEPCPYACVISLGDDSETDTEGDSESCSAREQECEVKLPFNAQRIISLSRNDFQSLLKMHKLTPEQLDCIHDIRRRSKNRIAAQRCRKRKLDCIQNLESEIEKLQSEKESLLKERDHILSTLGETKQNLTGLCQKVCKEAALSQEQIQILAKYSAADCPLSFLIZEKDKSTPDGELALPSIFSLSDRPPAVLPPCARGNSEPGYARGQESQQMSTATSEQAGPAEQCRQSGGISDFCQQMTDKCTTDE

SEQ ID NO: 286 - DNA, 5475 bp, Homo Sapiens
tcgcccccgccgggcgctctcgcttcagtcagtcgggccgcgccgcgcctcagctctggttgatgataattagaagcatgctttccactgaacttcccgacaacatttgttatgcagaatgtctctgagtgagaactcggtttttgcctatgaatcttctgtgcatagcaccaatgttttactcagccttaatgaccagcggaagaaagatgtgctgtgcgatgtcaccatctttgtggagggacagcggttccgcgctcaccggtccgtgctggcggcatgcagcagttacttccactcaagaatcgtaggccaggctgatggagagctgaacattactcttccagaagaggtgacagttaaaggatttgaacctttaattcagtttgcctacactgctaaactgattttaagtaaagagaatgtggatgaagtgtgcaaatgtgtggagtttttaagtgtacataatattgaggaatcctgctttcagtttctgaaatttaagtttttggactccactgcagaccagcaagaatgcccaagaaaaaaatgcttttcatcacactgtcagaaaacagaccttaaactttcacttttggaccagagggatctagaaactgatgaagtggaggaatttctggaaaataaaaatgttcagactcctcagtgtaaactccgcaggtatcaaggaaatgcaaaagcctcacctcctctacaagacagtgccagtcagacatatgagtccatgtgcttagagaaggatgctgctctggccttgccttctttatgccccaaatacagaaaattccaaaaagcatttggaactgacagagtccgtactggggaatctagtgtcaaagacattcatgcttctgttcagccaaatgaaaggtctgaaaatgaatgcctgggaggagtcccggagtgtagagatttgcaggtgatgttaaaatgtgacgaaagtaaattagcaatggaacctgaagaaacgaagaaagatcctgcttctcagtgcccaactgaaaaatcagaagtgactcctttcccccacaattcttccatagaccctcatggactttattctttgtctcttttacacacatatgaccaatatggtgacttgaattttgctggtatgcaaaacacaacagtgttaacagaaaagcctttgtcaggtacagacgtccaagaaaaaacatttggtgaaagtcaggatttacctttgaaatccgacttgggcaccagggaagatagtagtgttgcatctagtgataggagtagtgtggagcgagaagtggcagaacacctagcaaaaggcttctggagtgacatttgcagcacggacactccttgccaaatgcagttatcacctgctgtggccaaagatggctcagaacagatctcacagaaacggtctgagtgtccgtggttaggtatcaggattagtgagagcccagaaccaggtcaaaggactttcacaacattaagttctgtcaactgcccttttataagtactctgagtactgaaggctgttcaagcaatttggaaattggaaacgatgattatgtttcagaaccccagcaagaaccttgcccatatgcttgtgtcattagcttgggagacgactctgagacggacaccgaaggagacagtgaatcctgttcagccagagaacaagaatgtgaggtaaaactgccattcaatgcacaacggataatttcactgtctcgaaatgattttcagtccttgttgaaaatgcacaagcttactccagaacagctggattgtatccatgatattcgaagaagaagtaaaaacagaattgctgcacagcgctgtcgcaagagaaaacttgactgtatacagaatcttgaatcagaaattgagaagctgcaaagtgaaaaggagagcttgttgaaggaaagagatcacattttgtcaactctgggcgagacaaagcagaacctaactggactttgccagaaagtttgtaaagaagcagctctgagtcaagaacaaatacagatactcgccaagtactcagctgcagattgcccactttcatttttaatttctgaaaaagataaaagtactcctgatggtgaactggcgttaccatcaattttcagtttatctgaccggcctccagcagtgctgcctccctgtgccagaggaaacagtgagcctggctacgcgcgagggcaggagtcccagcagatgtccacagccacctctgagcaagctgggcctgcggaacagtgtcgtcagagtggtgggatctcagatttctgtcagcagatgactgataaatgtactactgatgagtaaacttgcattcacttccttcaaaccatctaattttctcctgaagttttggcagcgtcttgaaagcctaatatgaccatctgttgctcaacaatactgtttttttcctttagtagtttaccacaagggaatttcctttaagtcaaccatgatttctccttgatttctacaagagacaaagaaatgattttgcctcctggatatcagaaaaatccatgtgaaaatgtagtaaacctttaaaactcatgttttaaagaataataactctagtaataactcttcctgctattcagaataagtaggagaatgaaaactgcagcatatcagacagcaatttaacagcttgaaacatctacagatagttcctactaaaagaagtggcctgcagaagtttaataatttgacttttttctaatattttagtttgaaagaaaatttcttcccaagcaatgctaatagagttctattcttagaagcagggtgtcagctactgggaatatttttgtagagctgcattgtgaaaaaaagatggtcttacctgaatcttagggctttgttcttcggctcctaaaatcaggctttaagctacattgggaagatttagtaaataggcaagtggttggcctaagacgggggctgcttctcctcttcagtatggactctagaaagtctggctacatgaatagatttaagtgtcactttccctccctgccccccgcttcagtctctaccatatctggtcccatcatggacttcctatttcctggcatttttgtccctttggaagaagaaataggactcagaatacagtggcatgagtgattacactggcagcattatctcaggctccctagaatctggagagcttaccaacatgtaaagctgttcatttttccaccgtgggtcaccaatgccagaaaaccagacatcacggggaaagaatgttgcttactttttaccaggagtgcagttcatttttttcaccctgtttttgaagtcgtattattcacttgtaaaaatgattgtaacagataaaaaatgtatctgcagcaactctgcaggtttgtgaaataggatgaaactcaatctttttctattgtgggtttgcatttgaaaagcaggttgaatccttgctctcttctccaaatttggtgtggtataaagacacacaaatcattttaacttggacatttaaagatcagtcttagtgtttgttcagtcctgttacaaaatagataactgagcacctatcgcataacattttgcggtggcttttagccatgctggggttagatgtgtttgagagtcaaatgaaagctatggatcttctcagcaattaaaaaaaatgcatatattcacattcacagaaacattggcagaacccagttttaatggtacagaggagtagtttatagtgttgatttcaccaaaatcagagggctgaaagagacacttctatagactgcatcctgagcctagtgcagggcttgtctagctaatgtgggcagccaccacccactgtgtatgaacaagtctgaagcaagttggccttgcccttgagagtatatggggaccagtcttcatgtcttggagtaatttgtcaaatgttaccctttttgatcagggtgtagggggaggatattgctagtatattttcagtggtttgtatgttctctctgtcactgacttatttgtaagagaaaattagttggacttgtttattttctagtagcttttataagtacactcaagaatttgtcagggagaataattctgatagtgcatcccatactgcaaaagaatttgtgtgtgtgtgtgtgtgtgtgtgtgtgtatgtgtatgtatacatatatatctctccatataggtatttctttgatacttgtaattttaaatttcagcttcacgatataaaataatataagaacttctggtttacaaaatgtaaaatcttaagccaatggaacccttgatttcctacctcagtgtacactcaactattggttgtatcagtttgtgtatgtgcaaatgtcaaataatcttttgctttaattgctactgtacttgctttgaaagattacctactattttatgataaaatgtagttgtctccagagcttaaatataatttgtaaagcacttggtttaaatttctctctacctataaacagtttagcattaagggtttctattaatgacacagaattattggccaagtgtaatttcttaaaatttagcattactttaaatagccagcatgtaatacaagtaactacactacctcatatctacatgattttcaagttgtaatgcagatggacagataaaaaagattttacgtttgtcttttggccataagtgggaaagttttctgtatattgcatagcattacacatttatgcctattttaacattaacttctaaagaagttttttctaagaaaatgtttcaaggcaatattttttttgaggctgccgaagacaaatgacaggattatgagtatacagtgtatgccttttccttcatgcagaattttgaaatgttttcagtttgtatattgcatattcacatgatcattgctcactattttatgaactggccttctcaatgtttgatgattttttaaaagctgttatgttgaattcagtaaaataacattaccttattttttttcttattcaaattctggaactatagcaaataattcgttaaattgtcatattcaaaacaaatgtggatacagtcttggttctccatctgtaattttttttaacagtttgctatagcttactgcttaactaattttaaataaggaaataagtatgttagatgcagtagacgatacaggttgcatgtggacactcagtcacattaacaacttgggaaaaaaatggcaatgttacggtgaattctcaggtgaacttttttcagttataaaacatctattttgaatctgtaaatattttaaatgttttattaaggcatgtaataaactattctttgaaacttgttgggtagaatgaaaattaaagccataatggtaaaagatggcatactgattataaaagaagcagaaaaacattgatttttttatatctttcataatataattttctaacaatgcaataaaaccactaaacttttgtgtc

SEQ ID NO: 287 - protein, 562 aa, Homo Sapiens
MVKIVTVKTQAYQDQKPGTSGLRKRVKVFQSSANYAENFIQSIISTVEPAQRQEATLVVGGDGRFYMKEAIQLIARIAAANGIGRLVIGQNGILSTPAVSCIIRKIKAIGGIILTASHNPGGPNGDFGIKFNISNGGPAPEAITDKIFQISKTIEEYAVCPDLKVDLGVLGKQQFDLENKFKPFTVEIVDSVEAYATMLRSIFDFSALKELLSGPNRLKICIDAMHGVVGPYVKKILCEELGAPANSAVNCVPLEDFGGHHPDPNLTYAADLVETMKSGEHDFGAAFDGDGDRNMILGKHGFFVNPSDSVAVIAANIFSIPYFQQTGVRGFARSMPTSGALDRVASATKIALYETPTGWKFFGNLMDASKLSLCGEESFGTGSDHIREKDGLWAVLAWLSILATRKQSVEDILKDHWQKHGRNFFTRYDYEEVEAEGANKMMKDLEALMFDRSFVGKQFSANDKVYTVEKADNFEYSDPVDGSISRNQGLRLIFTDGSRIVFRLSGTGSAGATIRLYIDSYEKDVAKINQDPQVMLAPLISIALKVSQLQERTGRTAPTVIT

SEQ ID NO: 288 - DNA, 2320 bp, Homo Sapiens
gggccggccgcccctccgccagccaagtccgccgctctgacccccggcagcaagtcgccaccatggtgaagatcgtgacagttaagacccaggcgtaccaggaccagaagccgggcacgagcgggctgcggaagcgggtgaaggtgttccagagcagcgccaactacgcggagaacttcatccagagtatcatctccaccgtggagccggcgcagcggcaggaggccacgctggtggtgggcggggacggccggttctacatgaaggaggccatccagctcatcgctcgcatcgctgccgccaacgggatcggtcgcttggttatcggacagaatggaatcctctccacccctgctgtatcctgcatcattagaaaaatcaaagccattggtgggatcattctgacagccagtcacaacccagggggccccaatggagattttggaatcaaattcaatatttctaatggaggtcctgctccagaagcaataactgataaaattttccaaatcagcaagacaattgaagaatatgcagtttgccctgacctgaaagtagaccttggtgttctgggaaagcagcagtttgacttggaaaataagttcaaacccttcacagtggaaattgtggattcggtagaagcttatgctacaatgctgagaagcatctttgatttcagtgcactgaaagaactactttctgggccaaaccgactgaagatctgtattgatgctatgcatggagttgtgggaccgtatgtaaagaagatcctctgtgaagaactcggtgcccctgcgaactcggcagttaactgcgttcctctggaggactttggaggccaccaccctgaccccaacctcacctatgcagctgacctggtggagaccatgaagtcaggagagcatgattttggggctgcctttgatggagatggggatcgaaacatgattctgggcaagcatgggttctttgtgaacccttcagactctgtggctgtcattgctgccaacatcttcagcattccgtatttccagcagactggggtccgcggctttgcacggagcatgcccacgagtggtgctctggaccgggtggctagtgctacaaagattgctttgtatgagaccccaactggctggaagttttttgggaatttgatggacgcgagcaaactgtccctttgtggggaggagagcttcgggaccggttctgaccacatccgtgagaaagatggactgtgggctgtccttgcctggctctccatcctagccacccgcaagcagagtgtggaggacattctcaaagatcattggcaaaagcatggccggaatttcttcaccaggtatgattacgaggaggtggaagctgagggcgcaaacaaaatgatgaaggacttggaggccctgatgtttgatcgctcctttgtggggaagcagttctcagcaaatgacaaagtttacactgtggagaaggccgataactttgaatacagcgacccagtggatggaagcatttcaagaaatcagggcttgcgcctcattttcacagatggttctcgaatcgtcttccgactgagcggcactgggagtgccggggccaccattcggctgtacatcgatagctatgagaaggacgttgccaagattaaccaggacccccaggtcatgttggccccccttatttccattgctctgaaagtgtcccagctgcaggagaggacgggacgcactgcacccactgtcatcacctaagaagacaggcctgatgtggtacgtccctccacccccggacccatccaagtcatctgattgaagagcatgacagaaacaaaatgtattcaccaagcattttaggatttgactttttcactaaccagttgacgagcagtgcatttacaaggcactgccaaacaagatgcccttgggagctgtgagggaaagaggacctgcgggcttagatcaatctcaattccttttcatgccctcctgcattgctgctgcgtgggtatttgtctccttagccatcaggtacagtttacactacaatgtaagctataggtggagcatcagcagtgagtgaggccattcttcatccttaggatgtggcaatgaaatgatggtgcaagttcctttctcttttgtgaatctttccccccatttcctgtttacatgtaacccaacaaaatgcaatttctagtgccttctgtccaatcagttctttcctctgagtgagacgtacttggctacagatttctgccttgttttgcgacattgtcccattcacacagatattttgggataataaaggaaaataagctaca

SEQ ID NO: 289 - protein, 215 aa, Homo Sapiens [sequence omitted]

SEQ ID NO: 290 - DNA, 1582 bp, Homo Sapiens
gcactgagccgccgccgcttccggaagcgcagacccgctggtgccacgtttatccccttacatcctcctaggacccggtcggtagtcgtcgccccagcccgccgggggcaagcgcccaggtccgcggccctcgagacgggaccgagagcatcatgggcagcactgtcccgcgctccgcctccgtgctgcttctgctgctgctcctgcgccgggccgagcagccctgcggggccgagctcaccttcgagctgccggacaacgccaagcagtgcttctacgaggacatcgctcagggcaccaagtcgaccctggagttccaggtgattactggtggtcactatgatgtagattgtcgattagaagatcctgatggtaaagtgttatacaaagagatgaagaaacagtatgatagttttaccttcacagcctccaaaaatgggacatacaaattttgcttcagcaatgaattttctactttcacacataaaactgtatattttgattttcaagttggagagacccacctctgtttcctagtagaccgagtcagtgctcttacccagatggaatctgcctgtgtttcaattcacgaagctctgaagtctgtcatcgattatcagactcatttccgtttaagagaagctcaaggccgaagccgagcagaggatctaaatacaagagtggcctattggtcagtaggagaagccctcattcttctggtggttagcatagggcaggtatttcttttgaaaagctttttctcagataaaagaaccaccacaactcgtgttggatcataactacgttttgagaattgatgcaccattgccactgtaatattgctgtcctctaattaattttaggtactgaagaacttaatattggcaacatttttaaatccttactcatacacttgttgggagggatgtacaatgcatattcccaaactgtggaaaggacacctttttttatttgtaaaggtggaaaaactttggaactcattttgggctattcatgttaaatattcaacaccaatgatctactctgttcgcagttgtttatatctactcttcgcacactaaactttggtattttgattccttttaaccatttaagactacttttcttataggtagttgatattttaaaaactttagatttaatgtctacatgtgttagggaggaagaaaattgccttttaattgttaataagaaaaccaaatgtgatgaactgtagcccaagccctattctgcactgttcagttttatggaggaaaaataaatctaccataggaatgttagttaatattgataatcaattttgaaaatacagtggactgaaaagcaattttattctttcgaagatttcatttaaatctctgtactatgcatttttgtttcagtttgtaaatgtgtaacatttatagttaaataggacaaagcaggccctatgactattgttttcaaaaaattaatatataaataattcagaggggtttttcatttacttttgaaaagaaatttctttaacaggattgcacctatcaatttcttgtagaataaaaaaaaatctttcaacaaa

SEQ ID NO: 291 - protein, 220 aa, Homo Sapiens
MNGFTPDEMSRGGDAAAAVAAVVAAAAAAASAGNGTGAGTGAEVPGAGAVSAAGPPGAAGPGPGQLCCLREDGERCGRAAGNASFSKRIQKSISQKKVKIELDKSARHLYICDYHKNLIQSVRNRRKRKGSDDDGGDSPVQDIDTPEVDLYQLQVNTLRRYKRHFKLPTRPGLNKAQLVEIVGCHFRSIPVNEKDTLTYFIYSVKNDKNKSDLKVDSGVH

SEQ ID NO: 292 - DNA, 1125 bp, Homo Sapiens
cccccatgtgacagtgacggggtccccgctccaggagacgctcgagtctgcgtcccggccctcagcactgtccactgtttcggtgccagcagagaccagcaggcccgggacagttggtgtttggccgtgccgctgtctaacttggtgtgcagagtgaattgccgctgccggagcggagagaggcggagcggccaggagagaggggatttctgtcagcgccggcctcgggagctcggagacatgaacggcttcacgcctgacgagatgagccgcggcggggatgcggccgccgcagtggccgcagtggtcgctgccgcggccgccgccgcctcggcggggaacgggaccggcgcgggcaccggggctgaggtgccgggcgcgggggcggtctcagcggctgggcccccgggggcggccgggccgggccccgggcaactgtgctgcctgcgggaggatggtgagcggtgcggccgggcggcaggcaacgccagcttcagcaagaggatccagaagagcatctcccagaagaaggtgaagatcgagctggataagagcgcaaggcatctttacatatgtgattatcataaaaacttaattcagagtgttcgaaacagaagaaagagaaaagggagtgatgatgatggaggtgattcacctgttcaagatattgataccccagaggttgatttataccaattacaagtaaatacacttaggagatacaaaagacacttcaagctaccaaccagaccaggacttaataaagcacaacttgttgagatagttggttgccactttaggtctattccagtgaatgaaaaagacaccttaacatatttcatctactcagtgaagaatgacaagaacaaatcagatctcaaggttgatagtggtgttcactaggagacgtggaattgagactaataacttggatgttaacactgtttactgttttttcacatgtagaaatgttctttgtgtattttttctacagaggattttctctgattttattttctttgtttctgactctaataattagttggaaactcatataaaatgagctttcctaaattaaatctattttaaataaaggttattactattaaaaaaaaaaaaaaaaaa

SEQ ID NO: 293 - protein, 2201 aa, Homo Sapiens [sequence omitted]

SEQ ID NO: 294 - DNA, 9497 bp, Homo Sapiens
  misc_feature 6765: n = A,T,C or G
caaacatgtcagctgttactggaagtggcctggcctctatttatcttcctgatcctgatctctgttcggctgagctacccaccctatgaacaacatgaatgccattttccaaataaagccatgccctctgcaggaacacttccttgggttcaggggattatctgtaatgccaacaacccctgtttccgttacccgactcctggggaggctcccggagttgttggaaactttaacaaatccattgtggctcgcctgttctcagatgctcggaggcttcttttatacagccagaaagacaccagcatgaaggacatgcgcaaagttctgagaacattacagcagatcaagaaatccagctcaaacttgaagcttcaagatttcctggtggacaatgaaaccttctctgggttcctgtatcacaacctctctctcccaaagtctactgtggacaagatgctgagggctgatgtcattctccacaaggtatttttgcaaggctaccagttacatttgacaagtctgtgcaatggatcaaaatcagaagagatgattcaacttggtgaccaagaagtttctgagctttgtggcctaccaagggagaaactggctgcagcagagcgagtacttcgttccaacatggacatcctgaagccaatcctgagaacactaaactctacatctcccttcccgagcaaggagctggccgaagccacaaaaacattgctgcatagtcttgggactctggcccaggagctgttcagcatgagaagctggagtgacatgcgacaggaggtgatgtttctgaccaatgtgaacagctccagctcctccacccaaatctaccaggctgtgtctcgtattgtctgcgggcatcccgagggaggggggctgaagatcaagtctctcaactggtatgaggacaacaactacaaagccctctttggaggcaatggcactgaggaagatgctgaaaccttctatgacaactctacaactccttactgcaatgatttgatgaagaatttggagtctagtcctctttcccgcattatctggaaagctctgaagccgctgctcgttgggaagatcctgtatacacctgacactccagccacaaggcaggtcatggctgaggtgaacaagaccttccaggaactggctgtgttccatgatctggaaggcatgtgggaggaactcagccccaagatctggaccttcatggagaacagccaagaaatggaccttgtccggatgctgttggacagcagggacaatgaccacttttgggaacagcagttggatggcttagattggacagcccaagacatcgtggcgtttttggccaagcacccagaggatgtccagtccagtaatggttctgtgtacacctggagagaagctttcaacgagactaaccaggcaatccggaccatatctcgcttcatggagtgtgtcaacctgaacaagctagaacccatagcaacagaagtctggctcatcaacaagtccatggagctgctggatgagaggaagttctgggctggtattgtgttcactggaattactccaggcagcattgagctgccccatcatgtcaagtacaagatccgaatggacattgacaatgtggagaggacaaataaaatcaaggatgggtactgggaccctggtcctcgagctgacccctttgaggacatgcggtacgtctgggggggcttcgcctacttgcaggatgtggtggagcaggcaatcatcagggtgctgacgggcaccgagaagaaaactggtgtctatatgcaacagatgccctatccctgttacgttgatgacatctttctgcgggtgatgagccggtcaatgcccctcttcatgacgctggcctggatttactcagtggctgtgatcatcaagggcatcgtgtatgagaaggaggcacggctgaaagagaccatgcggatcatgggcctggacaacagcatcctctggtttagctggttcattagtagcctcattcctcttcttgtgagcgctggcctgctagtggtcatcctgaagttaggaaacctgctgccctacagtgatcccagcgtggtgtttgtcttcctgtccgtgtttgctgtggtgacaatcctgcagtgcttcctgattagcacactcttctccagagccaacctggcagcagcctgtgggggcatcatctacttcacgctgtacctgccctacgtcctgtgtgtggcatggcaggactacgtgggcttcacactcaagatcttcgctagcctgctgtctcctgtggcttttgggtttggctgtgagtactttgccctttttgaggagcagggcattggagtgcagtgggacaacctgtttgagagtcctgtggaggaagatggcttcaatctcaccacttcggtctccatgatgctgtttgacaccttcctctatggggtgatgacctggtacattgaggctgtctttccaggccagtacggaattcccaggccctggtattttccttgcaccaagtcctactggtttggcgaggaaagtgatgagaagagccaccctggttccaaccagaagagaatatcagaaatctgcatggaggaggaacccacccacttgaagctgggcgtgtccattcagaacctggtaaaagtctaccgagatgggatgaaggtggctgtcgatggcctggcactgaatttttatgagggccagatcacctccttcctgggccacaatggagcggggaagacgaccaccatgtcaatcctgaccgggttgttccccccgacctcgggcaccgcctacatcctgggaaaagacattcgctctgagatgagcaccatccggcagaacctgggggtctgtccccagcataacgtgctgtttgacatgctgactgtcgaagaacacatctggttctatgcccgcttgaaagggctctctgagaagcacgtgaaggcggagatggagcagatggccctggatgttggtttgccatcaagcaagctgaaaagcaaaacaagccagctgtcaggtggaatgcagagaaagctatctgtggccttggcctttgtcgggggatctaaggttgtcattctggatgaacccacagctggtgtggacccttactcccgcaggggaatatgggagctgctgctgaaataccgacaaggccgcaccattattctctctacacaccacatggatgaagcggacgtcctgggggacaggattgccatcatctcccatgggaagctgtgctgtgtgggctcctccctgtttctgaagaaccagctgggaacaggctactacctgaccttggtcaagaaagatgtggaatcctccctcagttcctgcagaaacagtagtagcactgtgtcatacctgaaaaaggaggacagtgtttctcagagcagttctgatgctggcctgggcagcgaccatgagagtgacacgctgaccatcgatgtctctgctatctccaacctcatcaggaagcatgtgtctgaagcccggctggtggaagacatagggcatgagctgacctatgtgctgccatatgaagctgctaaggagggagcctttgtggaactctttcatgagattgatgaccggctctcagacctgggcatttctagttatggcatctcagagacgaccctggaagaaatattcctcaaggtggccgaagagagtggggtggatgctgagacctcagatggtaccttgccagcaagacgaaacaggcgggccttcggggacaagcagagctgtcttcgcccgttcactgaagatgatgctgctgatccaaatgattctgacatagacccagaatccagagagacagacttgctcagtgggatggatggcaaagggtcctaccaggtgaaaggctggaaacttacacagcaacagtttgtggcccttttgtggaagagactgctaattgccagacggagtcggaaaggattttttgctcagattgtcttgccagctgtgtttgtctgcattgcccttgtgttcagcctgatcgtgccaccctttggcaagtaccccagcctggaacttcagccctggatgtacaacgaacagtacacatttgtcagcaatgatgctcctgaggacacgggaaccctggaactcttaaacgccctcaccaaagaccctggcttcgggacccgctgtatggaaggaaacccaatcccagacacgccctgccaggcaggggaggaagagtggaccactgccccagttccccagaccatcatggacctcttccagaatgggaactggacaatgcagaacccttcacctgcatgccagtgtagcagcgacaaaatcaagaagatgctgcctgtgtgtcccccaggggcaggggggctgcctcctccacaaagaaaacaaaacactgcagatatccttcaggacctgacaggaagaaacatttcggattatctggtgaagacgtatgtgcagatcatagccaaaagcttaaagaacaagatctgggtgaatgagtttaggtatggcggcttttccctgggtgtcagtaatactcaagcacttcctccgagtcaagaagttaatgatgccaccaaacaaatgaagaaacacctaaagctggccaaggacagttctgcagatcgatttctcaacagcttgggaagatttatgacaggactggacaccagaaataatgtcaaggtgtggttcaataacaagggctggcatgcaatcagctctttcctgaatgtcatcaacaatgccattctccgggccaacctgcaaaagggagagaaccctagccattatggaattactgctttcaatcatcccctgaatctcaccaagcagcagctctcagaggtggctccgatgaccacatcagtggatgtccttgtgtccatctgtgtcatctttgcaatgtccttcgtcccagccagctttgtcgtattcctgatccaggagcgggtcagcaaagcaaaacacctgcagttcatcagtggagtgaagcctgtcatctactggctctctaattttgtctgggatatgtgcaattacgttgtccctgccacactggtcattatcatcttcatctgcttccagcagaagtcctatgtgtcctccaccaatctgcctgtgctagcccttctacttttgctgtatgggtggtcaatcacacctctcatgtacccagcctcctttgtgttcaagatccccagcacagcctatgtggtgctcaccagcgtgaacctcttcattggcattaatggcagcgtggccacctttgtgctggagctgttcaccgacaataagctgaataatatcaatgatatcctgaagtccgtgttcttgatcttcccacatttttgcctgggacgagggctcatcgacatggtgaaaaaccaggcaatggctgatgccctggaaaggtttggggagaatcgctttgtgtcaccattatcttgggacttggtgggacgaaacctcttcgccatggccgtggaaggggtggtgttcttcctcattactgttctgatccagtacagattcttcatcaggcccagacctgtaaatgcaaagctatctcctctgaatgatgaagatgaagatgtgaggcgggaaagacagagaattcttgatggtggaggccagaatgacatcttagaaatcaaggagttgacgaagatatatagaaggaagcggaagcctgctgttgacaggatttgcgtgggcattcctcctggtgagtgctttgggctcctgggagttaatggggctggaaaatcatcaactttcaagatgttaacaggagataccactgttaccagaggagatgctttccttaacagaaatagtatcttatcaaacatccatgaagtacatcagaacatgggctactgccctcagtttgatgccatcacagagctgttgactgggagagaacacgtggagttctttgcccttttgagaggagtcccagagaaagaagttggcaaggttggtgagtgggcgattcggaaactgggcctcgtgaagtatggagaaaaatatgctggtaactatagtggaggcaacaaacgcaagctctctacagccatggctttgatcggcgggcctcctgtggtgtttctggatgaacccaccacaggcatggatcccaaagcccggcggttcttgtggaattgtgccctaagtgttgtcaaggaggggagatcagtagtgcttacatctcatagtatggaagaatgtgaagctctttgcactaggatggcaatcatggtcaatggaaggttcaggtgccttggcagtgtccagcatctaaaaaataggtttggagatggttatacaatagttgtacgaatagcagggtccaacccggacctgaagcctgtccaggatttctttggacttgcatttcctggaagtgttccaaaagagaaacaccggaacatgctacaataccagcttccatcttcattatcttctctggccaggatattcagcatcctctcccagagcaaaaagcgactccacatagaagactactctgtttctcagacaacacttgaccaagtatttgtgaactttgccaaggaccaaagtgatgatgaccacttaaaagacctctcattacacaaaaaccagacagtagtggacgttgcagttctcacatcttttctacaggatgagaaagtgaaagaaagctatgtatgaagaatcctgttcatacggggtggctgaaagtaaagaggnactagactttcctttgcaccatgtgaagtgttgtggagaaaagagccagaagttgatgtgggaagaagtaaactggatactgtactgatactattcaatgcaatgcaattcaatgcaatgaaaacaaaattccattacaggggcagtgcctttgtagcctatgtcttgtatggctctcaagtgaaagacttgaatttagttttttacctatacctatgtgaaactctattatggaacccaatggacatatgggtttgaactcacactttttttttttttttgttcctgtgtattctcattggggttgcaacaataattcatcaagtaatcatggccagcgattattgatcaaaatcaaaaggtaatgcacatcctcattcactaagccatgccatgcccaggagactggtttcccggtgacacatccattgctggcaatgagtgtgccagagttattagtgccaagtttttcagaaagtttgaagcaccatggtgtgtcatgctcacttttgtgaaagctgctctgctcagagtctatcaacattgaatatcagttgacagaatggtgccatgcgtggctaacatcctgctttgattccctctgataagctgttctggtggcagtaacatgcaacaaaaatgtgggtgtctctaggcacgggaaacttggttccattgttatattgtcctatgcttcgagccatgggtctacagggtcatccttatgagactcttaaatatacttagatcctggtaagaggcaaagaatcaacagccaaactgctggggctgcaagctgctgaagccagggcatgggattaaagagattgtgcgttcaaacctagggaagcctgtgcccatttgtcctgactgtctgctaacatggtacactgcatctcaagatgtttatctgacacaagtgtattatttctggctttttgaattaatctagaaaatgaaaagatggagttgtattttgacaaaaatgtttgtactttttaatgttatttggaattttaagttctatcagtgacttctgaatccttagaatggcctctttgtagaaccctgtggtatagaggagtatggccactgccccactatttttattttcttatgtaagtttgcatatcagtcatgactagtgcctagaaagcaatgtgatggtcaggatctcatgacattatatttgagtttctttcagatcatttaggatactcttaatctcacttcatcaatcaaatattttttgagtgtatgctgtagctgaaagagtatgtacgtacgtataagactagagagatattaagtctcagtacacttcctgtgccatgttattcagctcactggtttacaaatataggttgtcttgtggttgtaggagcccactgtaacaatactgggcagcctttttttttttttttaattgcaacaatgcaaaagccaagaaagtataagggtcacaagtctaaacaatgaattcttcaacagggaaaacagctagcttgaaaacttgctgaaaaacacaacttgtgtttatggcatttagtaccttcaaataattggctttgcagatattggataccccattaaatctgacagtctcaaatttttcatctcttcaatcactagtcaagaaaaatataaaaacaacaaatacttccatatggagcatttttcagagttttctaacccagtcttatttttctagtcagtaaacatttgtaaaaatactgtttcactaatacttactgttaactgtcttgagagaaaagaaaaatatgagagaactattgtttggggaagttcaagtgatctttcaatatcattactaacttcttccactttttccaaaatttgaatattaacgctaaaggtgtaagacttcagatttcaaattaatctttctatattttttaaatttacagaatattatataacccactgctgaaaaagaaaaaaatgattgttttagaagttaaagtcaatattgattttaaatataagtaatgaaggcatatttccaataactagtgatatggcatcgttgcattttacagtatcttcaaaaatacagaatttatagaataatttctcctcatttaatatttttcaaaatcaaagttatggtttcctcattttactaaaatcgtattctaattcttcattatagtaaatctatgagcaactccttacttcggttcctctgatttcaaggccatattttaaaaaatcaaaaggcactgtgaactattttgaagaaaacacaacattttaatacagattgaaaggacctcttctgaagctagaaacaatctatagttatacatcttcattaatactgtgttaccttttaaaatagtaattttttacattttcctgtgtaaacctaattgtggtagaaatttttaccaactctatactcaatcaagcaaaatttctgtatattccctgtggaatgtacctatgtgagtttcagaaattctcaaaatacgtgttcaaaaatttctgcttttgcatctttgggacacctcagaaaacttattaacaactgtgaatatgagaaatacagaagaaaataataagccctctatacataaatgcccagcacaattcattgttaaaaaacaaccaaacctcacactactgtatttcattatctgtactgaaagcaaatgctttgtgactattaaatgttgcacatcattcattcaaaaaaaaaaaaaaaaaaa

SEQ ID NO: 295 - protein, 1078 aa, Homo Sapiens
PPGPERSRLGLGVSLHQRSCPKCIAVFTRVSEPRIQFPASRILPSSNTSKDFDPVSGQSNYGGSQGSGQTLNRPPVASNPVTPSLHSGPAPRMPLPASQNPATTPMPSSSFLPEANLPPPLNWQYNYPSTASQTNHCPRASSQPTVSGNTSLTTNHQYVSSGYPSLQNSFIKSGPSVPPLVNPPLPTTFQPGAPHGPPPAGGPPPVRALTPLTSSYRDVPQPLFNSAVNQEGITSNTNNGSMVVHSSYDEIEGGGLLATPQLTNKNPKMSRSVGYSYPSLPPGYQNTTPPGATGVPPSSLNYPSGPQAFTQTPLGANHLTTSMSGLSLQPEGLRVVNLLQERNMLPSTPLKPPVPNLHEDIQKLNCNPELFRCTLTSIPQTQALLNKAKLPLGLLLHPFKDLVQLPVVTSSTIVRCRSCRTYINPFVSFLDQRRWKCNLCYRVNDVPEEFLYNPLTRVYGEPHRRPEVQNATIEFMAPSEYMLRPPQPPVYLFVFDVSHNAVETGYLNSVCQSLLDNLDLLPGNTRTKIGFITFDSTIHFYGLQESLSQPQMLIVSDIEDVFIPMPENLLVNLNESKELVQDLLKTLPQMFTKTLETQSALGPALQAAFKLMSPTGGRMSVFQTQLPTLGVGALKPREEPNHRSSAKDIHMTPSTDFYKKLALDCSGQQVAVDLFLLSGQYSDLASLGCISRYSAGSVYYYPSYHHQHNPVQVQKLQKELQRYLTRKIGFEAVMRIRCTKGLSIHTFHGNFFVRSTDLLSLPNVNPDAGYAVQMSVEESLTDTQLVSFQSALLYTSSKGERRIRVHTLCLPVVSTLNDVFLGADVQAISGLLANMAVDRSMTASLSDARDALVNAVIDSLSAYRSSVLSNQQPGLMVPFSLRLFPLFVLALLKQKSFQTGTNARLDERIFAMCQVKNQPLVYLMLTTHPSLYRVDNLSDEGALNISDRTIPQPPILQLSVEKLSRDGAFLMDAGSVLMLWVGKNCTQNFLSQVLGVQNYASIPQPMTDLPELDTPESARIIAFISWLREQRPFFPILYVIRDESPMKANFLQNMIEDRTESALSYYEFLLHIQQQVNK

SEQ ID NO: 296 - DNA, 5967 bp, Homo Sapiens
cctccaggcccagaacggagccgccttggcctcggggtctccctacaccaacggtcctgtccaaaatgcattgctgtcttcacaagagtcagtgagccaaggatacaatttccagcttccaggatcctaccctcatccaataccagcaaagactttgatccagtctctggccagtctaactatggtggttctcagggatctgggcagactcttaatagaccacctgtggcctctaatccagtgacaccttcgcttcatagtggtcctgctccccgaatgccattacctgcttctcagaacccagctactacaccaatgccttctagtagctttcttcctgaagccaacctgccaccacctttgaattggcaatataactatccatccacagcctcacaaacaaaccattgtcctcgtgcatcatcccaaccaactgtatctggaaatacaagtttaaccacaaatcatcaatatgtttcttctggatatccttcacttcaaaatagcttcataaagtcaggtccttctgtacctcccttagtgaatccacctctgcctacaacttttcaaccaggagctcctcatgggccccctccagctggaggcccacccccagtgagggccctcacgcccctgacatcatcatatagagatgtaccccagcccttatttaattcagctgtcaaccaagaaggtattacatcaaataccaataacggatctatggtggtccacagtagttacgacgagattgaaggaggtggcttattggcaacaccacagcttactaacaagaatcccaaaatgagccgaagtgttggatattcatatccctccttaccacctggttatcagaacacaacaccacctggtgcaactggagtaccaccctcttccttgaattacccaagtgggccacaagcctttactcagactcccttaggtgctaatcatttaaccacaagcatgagtggattaagtctacaaccagagggtctaagagttgtcaatcttcttcaagaaagaaacatgcttccgtcaacacctttgaagcctccagttccaaatttgcatgaagacatccagaaactcaactgtaacccagagttatttcgatgcacgctgactagcattcctcagacgcaggccttattgaataaagccaaacttcctttggggctgctgcttcatcctttcaaagacttagtgcaattgcctgtggttacctccagtacaattgtgagatgccgttcatgcaggacgtacatcaatcctttcgtcagctttcttgatcaaaggagatggaagtgtaacttatgttatcgagtcaatgatgttcctgaagaattcttgtacaaccctttgaccagagtttatggagaacctcacagaagaccagaagttcaaaatgctactattgagtttatggctccttcagaatacatgttacgaccacctcagcctccagtgtatctctttgtatttgatgtgtctcacaatgcagtcgaaactggatacttgaattcagtttgccagagtttgttagacaatctggatttgcttcctggcaacactagaacaaaaattggcttcataacatttgacagtacaatccatttctacggtcttcaggaaagtctctctcaacctcagatgctaatagtttcagatattgaagatgtttttatacctatgccagagaacttattagtaaacttaaatgaaagtaaagagctcgtgcaagatttactgaaaactttgccacaaatgtttaccaagactctggagacccagagtgccttgggtcctgcactgcaggctgcctttaagctgatgtctccaactggtggtcgaatgtctgtctttcaaacacaactcccaactcttggagtgggagccctgaaaccacgagaggaaccaaaccacaggtcatctgctaaggatatacacatgacaccatccactgacttctataagaaattagccttggactgttctggtcagcaagttgctgttgacttattccttctcagtggacagtattctgatttggcttctctgggttgtatttctcggtattcagcaggtagtgtctattactatccctcttaccatcatcagcacaacccagtccaagtacagaaattacagaaggaactacagagataccttactcggaagattggctttgaggcagtcatgaggattcggtgcaccaaaggtctttccattcatactttccatggaaacttctttgttaggtcaaccgacttactgtctttgcctaacgtcaacccagacgctgggtatgcagtacagatgtcagtggaagagagtcttactgacactcagttggtttcttttcagtcagcactcttgtatacatccagcaaaggcgaaagaagaattcgtgttcatactttgtgtttgccagtagtttcgactctgaatgatgtctttcttggagctgatgttcaagcaatttcagggttattggccaatatggctgttgacagatctatgactgccagtctgagtgacgctcgggatgctctagtgaatgcagtcattgactccctttcagcttaccgttcttcagtcttaagtaaccagcagcctggactcatggttcctttttctttgcggcttttcccactttttgtgttggctctccttaaacagaaatcattccagactgggacaaatgcacgtctagatgaacgcatttttgctatgtgtcaagtgaaaaaccagcccttggtttaccttatgctcacaactcatcccagtttgtatagagttgacaatctctcagatgagggagcactcaacatcagtgatagaaccatacctcagccccccattcttcagctttcagtggagaagctgagcagagatggagctttcctcatggatgcaggctctgtactgatgctttgggttggaaaaaattgtacacagaattttctcagccaagttctaggagttcaaaactatgcatcaattccacagcctatgacagaccttccagaacttgatacaccagaatctgccagaataatagctttcatctcttggcttagagagcagagaccatttttcccaatactttatgtaataagggatgagagtccaatgaaagcaaacttccttcaaaacatgatagaagacagaacagaatctgcattatcatattatgaattcctgttgcatatacagcaacaagtgaataaatgaatgaatgaagaaatttgacttatttttaaggaatgtcacaatagtgcagaatacctggaaatgtgtaataccttctttttctattatgtttgtggactaatgtgatgattgagatgttctcactgtgatttcaacaacctataagcaaataaaagaccacagcagagaatcaaacatgcaactctgaaatactgtatttttcaaatcagaatatagctacgtatgattggatacttttttcttgccaattatgtttgagttgttatggattaaaataagaatattgcagaggcaaagtacattttgtaaaataaagatttctgtgttctacatgtatatttctcatttttaatttttctgaatctttggctgctacatttaaaacctcacaaacctaagtgttgcagggaagttacaaattgattggtagtgatgtttttaaaataaaaacaatggaaagtaaatataatgtaggaaaactagaattcattccccacacgtgtcttttttttttctttgttaagggaaaggatcatgttgactaaaactaaactaattctagtatagcttgagaaaaatatgaagaaacacattcaagctttaaaatctgtcagtattctttatgcttgaagaacaaagtcactttgatttgaagtgagaactatcattaggtggttttctgatttcctgatgaagagttggacatactgtcttaatctatagtgaaaagaatttgagctgtcttcataaacactgggactagcaatgataatagggagataagaaactttaattatcttgatcctttaagtggattttatttggtgcatttctgctctgggtatataataaaagtgggggtttttggtgaaatgagtgaagaaatgaaaggtttctaaagtgctatccaaatacatcagtaacatttttctaaggagtttaattgttaaattggaagtcattcataagaaatatttatgcttgaatatgaaaatctatgaaagcataaatgctgctgtttgatttggtggatattaagattatacacatccaacatattaaagttatgaaagaaacttgacttctgaaaatccttaagagactgctttcttgattcagctagagaaatattatagtcaaaactattgagtgaattttgtttacaaataggtaaattatacatttgtatatttaaagtgctgtgacatagtatctttaagagtttggctcagttttcacagattcattttgtcttaagaatttcttaaatatgttcatgtataatacttgatcaaaatatttttgggttttttgttttgttttaatgggttagaaaatgtttacaatcttggtcttatatgatcaccaatggaatagtaacttccaggtttatatcaatatgagctgactttaactgagttgtttgggatagggaagaagcagtccctctacagtatacaactactgcttgccagctggatcaaaataatcatgttttatgaaaatatctcccttaagcagtgttaaggttggtttgcagtgtgtaagtggcacattgaactggaagttttcttgaaagctgcttcatctattaagaagcaattttcaaattgtagcgaattatattatcccctcttttaaagaaacagtcgttatatgctgatgtttcttaaaataactaaaatgttcctcttaatgtgattttaaatggagttatttgtaggtcctttcttagtagtaaagaatcttctagagggaaacatttgtgcttttagggataatcttccttgtgcctcactacatccctaagtgggtatgactcttgttattaccacatgcttttttagtatatttcacaaatttacttttaaatattattttagatacggtgtaacatgtgcaattcagaataattttataacaggtcatgaaaaacataactttagttaggattcacaatatttgttctccacataatgagagatgaatgagcctttggagatactgatataaggcaattattttttgcaatgttgaatgtgttttttagtttgattctttttttttcccccaatagggcactacctgccatatcatcttgtattactttttgatgtaaagcgactaatatttacactatgccatattttttttaattatagttgtaaattatgaaagatccttgaattttctacagatctacaactactaatgtaacagacaagggcaatcttggtatttaaatctgagcatggcagttctaccataaaaagtactctatttttctaatttctaggatttttaaaataacatttctgtaagtctgacatactaatagtcactcaagcagtaccatttattttagtttgcatatattttcactgtttttaatttaatgtattgagtctaatagactgttttgcaataattagaataaagatttatttcttctaatcaaagatgcataacagctattatctaggggaccacctaaatgtgatttcaaaattttgttaactattacaaatgtaatccttatatagaaattttaattttgtaaagtagtgtataatattgtaatattaaattcttgttcttaaattcaaatatgtattgatcttcaatgtgctgtgttaaatcttgcttctctgaaaagttggagacaagatttgtcttcctttttacagtttgtaattttcactgttttattcctgttaaaaaaaaaaaaaa

SEQ ID NO: 297 - protein, 397 aa, Homo Sapiens
MNWHLPLFLLASVTLPSICSHFNPLSLEELGSNTGIQVFNQIVKSRPHDNIVISPHGIASVLGMLQLGADGRTKKQLAMVMRYGVNGVGKILKKINKAIVSKKNKDIVTVANAVFVKNASEIEVPFVTRNKDVFQCEVRNVNFEDPASACDSINAWVKNETRDMIDNLLSPDLIDGVLTRLVLVNAVYFKGLWKSRFQPENTKKRTFVAADGKSYQVPMLAQLSVFRCGSTSAPNDLWYNFIELPYHGESISMLIALPTESSTPLSAIIPHISTKTIDSWMSIMVPKRVQVILPKFTAVAQTDLKEPLKVLGITDMFDSSKANFAKITRSENLHVSHILQKAKIEVSEDGTKASAATTAILIARSSPPWFIVDRPFLFFIRHNPTGAVLFMGQINKP

SEQ ID NO: 298 - DNA, 1191 bp, Homo Sapiens
atgaactggcatctccccctcttcctcttggcctctgtgacgctgccttccatctgctcccacttcaatcctctgtctctcgaggaactaggctccaacacggggatccaggttttcaatcagattgtgaagtcgaggcctcatgacaacatcgtgatctctccccatgggattgcgtcggtcctggggatgcttcagctgggggcggacggcaggaccaagaagcagctcgccatggtgatgagatacggcgtaaatggagttggtaaaatattaaagaagatcaacaaggccatcgtctccaagaagaataaagacattgtgacagtggctaacgccgtgtttgttaagaatgcctctgaaattgaagtgccttttgttacaaggaacaaagatgtgttccagtgtgaggtccggaatgtgaactttgaggatccagcctctgcctgtgattccatcaatgcatgggttaaaaacgaaaccagggatatgattgacaatctgctgtccccagatcttattgatggtgtgctcaccagactggtcctcgtcaacgcagtgtatttcaagggtctgtggaaatcacggttccaacccgagaacacaaagaaacgcactttcgtggcagccgacgggaaatcctatcaagtgccaatgctggcccagctctccgtgttccggtgtgggtcgacaagtgcccccaatgatttatggtacaacttcattgaactgccctaccacggggaaagcatcagcatgctgattgcactgccgactgagagctccactccgctgtctgccatcatcccacacatcagcaccaagaccatagacagctggatgagcatcatggtccccaagagggtgcaggtgatcctgcccaagttcacagctgtagcacaaacagatttgaaggagccgctgaaagttcttggcattactgacatgtttgattcatcaaaggcaaattttgcaaaaataacaaggtcagaaaacctccatgtttctcatatcttgcaaaaagcaaaaattgaagtcagtgaagatggaaccaaagcttcagcagcaacaactgcaattctcattgcaagatcatcgcctccctggtttatagtagacagaccttttctgtttttcatccgacataatcctacaggtgctgtgttattcatggggcagataaacaaaccc

SEQ ID NO: 299 - protein, 767 aa, Homo Sapiens
MSQRPRAPRSALWLLAPPLLRWAPPLLTVLHSDLFQALLDILDYYEASLSESQKYRYQDEDTPPLEHSPAHLPNQANSPPVIVNTDTLEAPGYELQVNGTEGEMEYEEITLERGNSGLGFSIAGGTDNPHIGDDPSIFITKIIPGGAAAQDGRLRVNDSILFVNEVDVREVTHSAAVEALKEAGSIVRLYVMRRKPPAEKVMEIKLIKGPKGLGFSIAGGVGNQHIPGDNSIYVTKIIEGGAAHKDGRLQIGDKILAVNSVGLEDVMHEDAVAALKNTYDVVYLKVAKPSNAYLSDSYAPPDITTSYSQHLDNEISHSSYLGTDYPTAMTPTSPRRYSPVAKDLLGEEDIPREPRRIVIHRGSTGLGFNIVGGEDGEGIFISFILAGGPADLSGELRKGDQILSVNGVDLRNASHEQAAIALKNAGQTVTIIAQYKPEEYSRFEAKIHDLREQLMNSSLGSGTASLRSNPKRGFYIRALFDYDKTKDCGFLSQALSFRFGDVLHVIDASDEEWWQARRVHSDSETDDIGFIPSKRRVERREWSRLKAKDWGSSSGSQGREDSVLSYETVTQMEVHYARPIIILGPTKDRANDDLLSEFPDKFGSCVPHTTRPKREYEIDGRDYHFVSSREKMEKDIQAHKFIEAGQYNSHLYGTSVQSVREVAEQGKHCILDVSANAVRRLQAAHLHPIAIFIRPRSLENVLEINKRITEEQARKAFDRATKLEQEFTECFSAIVEGDSFEEIYHKVKRVIEDLSGPYIWVPARERL

SEQ ID NO: 300 - DNA, 3995 bp, Homo Sapiens
ggatccgcgggacagatgaggaaggggcttaagtcactgcagccagagggatggaggtggactgatgggagggcttctccggtggggttagaagggaaaagtagggaaagagaagtgtaaggtagatggcagaggcagagacatggaaagacagactctagggttcctgatgatatctatctcggccaacacaaaagggagggtacagtggtgggggcacccaagctagggtgtgagtaccctaagtgtattcttctgagatgtaggccattcactaactcttggaacagctacagtttcacagtaggaagacccccccagattcactgcccctcccttagtaaagcctctgagaccttcctgaacattcccttctgtctttgccctctgttccttccagagactatgtgcccaggcagatggattcctcccgggcctgagaggaactgcaggaattctcctgcctcttacccgtaaaaccccaacttctctagccctagggcaggaagtcccaaacaatttctacccctttttctgcaattctcattggggtgagaggaggcccaggaggagagagagctgggctcagcttctttttgagctgctggagccctctgtgaggaggccctctttgctggcttctcaggagagtgtggctaggttctgcctgcctatgggaagagggggccagggtgtgtggagcaagatggtgcggtgctggtgccttgggacctgggggaatgggacagctggtcggctcagagacggcctactttactcacagctggaatttagtggggagaagcagctcaactccaatcctggaggattagggagattaaagtgagagaagagagagatgtcccagagaccaagagctcccaggtcagccctctggctcctggcacccccactgctgcggtgggcacccccactcctcacagtgctgcatagcgacctcttccaggccttgctggacatcctggactattatgaggcttccctctcagagagtcagaaataccgctaccaagatgaagacacgccccctctggagcacagcccggcccacctccccaaccaggccaattctcccccagtgattgtcaacacagataccctagaagccccaggatatgagttgcaggtgaacgggaccgagggggagatggaatacgaggaaatcacattggaaaggggtaactcaggtctgggcttcagcatcgcaggtggcactgacaacccacacatcggtgacgacccatccattttcatcaccaagatcattcctggtggggctgcggcccaggatggccgcctcagggtcaacgacagcatcctgtttgtaaatgaagtggacgtgcgcgaggtgacccactcagcggcggtggaagccctcaaagaggcaggctccatcgttcgcctctatgtcatgcgccggaagcccccggctgagaaggtcatggagatcaagctcatcaaggggcctaaaggtcttggcttcagcatcgcagggggcgtagggaaccagcacatcccaggagataatagcatctatgtaacaaagatcatcgaagggggtgctgcccacaaggatgggaggttgcagattggagacaagatcctggcggtcaacagtgtggggctagaggacgtcatgcatgaagatgctgtggcagccctgaagaacacgtatgatgttgtctacctaaaggtggccaagcccagcaatgcctacctgagtgacagctatgctcccccagacatcacaacctcttattcccagcacctggacaatgagatcagtcacagcagctacctgggcaccgactaccccacagccatgacccccacttcccctcggcgctactctccagtggccaaggacctgctcggggaggaagacattccccgagaaccgaggcgaattgtgatccaccggggctccacgggcctgggcttcaacatcgtgggtggcgaggacggtgaaggcatcttcatctcctttatcctggccgggggccctgcagacctcagtggggagctgcggaagggggaccagatcctgtcggtcaacggtgtggacctccgaaatgccagccatgagcaggctgccattgccctgaagaatgcgggtcagacggtcacgatcatcgctcagtataaaccagaagagtacagccgattcgaggccaagatccacgaccttcgggaacagctcatgaacagcagcctgggctcagggactgcgtccttgcggagcaaccccaaaaggggtttctacatcagggccctgtttgattacgacaagaccaaggactgcggcttcctgagccaggccctgagcttccgctttggggatgtgctgcatgtcatcgatgctagtgatgaggagtggtggcaggcacggcgggtccactctgacagtgagaccgacgacattgggttcatccccagcaaacggcgggttgagcgacgagagtggtcaaggttaaaggccaaggactggggctccagctctggatcgcagggtcgagaagactcggttctgagctacgagacagtgacgcagatggaagtgcactatgctcgccccatcatcatccttgggcccaccaaggaccgcgccaacgatgatcttctctccgagttccccgacaagtttggatcctgtgttccccatacgacacggcccaagcgggagtatgagatagatggccgggattaccactttgtgtcgtcccgggagaaaatggagaaggacattcaggcgcacaagttcattgaggccggccagtacaacagccacctctatgggaccagcgtccagtccgtgcgagaggtggcagagcaggggaagcactgcatcctcgatgtctcggccaatgccgtgcggcggctgcaggcggcccacctgcaccccatcgccatcttcatccgcccccgctccctggagaatgtgctagagattaacaagcggatcacagaggagcaagcccgcaaagccttcgacagagccaccaagctggagcaggagttcacagagtgcttctcagccatcgtggagggtgacagctttgaggagatctaccacaaggtgaagcgtgtcatcgaggacctctcaggcccctacatctgggttccagcccgagagagactctgattcctgccctggcttggcctggactcgccctgcctccatcacctgggcccttggtctggactgaattgcccaagcccttggctccccccggcctccctcccaccccttcttatttatttcctttctaactggatccagcctgttggaggggggacactcctctgcatgtatccccgcaccccagaactgggctcctgaacgccaggaacctggggtctgggggggagctgggctccttgttccgagcccttgctccttaggatccccgcccccacctgcccccaatgcacacacagacccaccgggggccacctgccctcccccatcctctcccacacacattccagaagtcagggccccctcgaggagcacccgctgcagggatgcagggccacaggcctccgctctctcctaaggcagggtctggggtcacccctgcctcatcgtaattccccatgttaccttgatttctcatttattttttccactttttttcttctcaaaggtggttttttggggggagaagcaggggactccgcagcgggcccctgccttccacatgcccccaccatttttctttgccggtttgcatgagtggaaggtctaaatgtggctttttttttttttttcctgggaatttttttggggaaaagggagggatgggtctagggagtgggaaatgcgggagggagggtggggcaggggtcgggggtcgggtgtccgggagccagggaagactggaaatgctgccgccttctgcaatttatttatttttttcttttgagagagtgaaaggaagagacagatacttgaaaaaaaaaaaaaaaaaaaa

SEQ ID NO: 301 - protein, 184 aa, Homo Sapiens
MDRGEQGLLRTDPVPEEGEDVAATISATETLSEEEQEELRRELAKVEEEIQTLSQVLAAKEKHLAEIKRKLGINSLQELKQNIAKGWQDVTATSAYKKTSETLSQAGQKASAAFSSVGSVITKKLEDVKNSPTFKSFEEKVENLKSKVGGTKPAGGDFGEVLNSAANASATTTEPLPEKTQESL

SEQ ID NO: 302 - DNA, 3247 bp, Homo Sapiens
gaggagctctgcgcggcgcggcgggcgatccgagccgggacgggctgcaggcgggggtgctgcagaggacacgaggcggcgggctggagacatggaccgcggcgagcaaggtctgctgagaacagacccagtccctgaggaaggagaagatgttgctgccacgatcagtgccacagagaccctctcggaagaggagcaggaagagctaagaagagaacttgcaaaggtagaagaagaaatccagactctgtctcaagtgttagcagcaaaagagaagcatctagcagagatcaagcggaaacttggaatcaattctctacaggaactaaaacagaacattgccaaagggtggcaagacgtgacagcaacatctgcttacaagaagacatctgaaaccttatcccaggctggacagaaggcctcagctgctttttcgtctgttggctcagtcatcaccaaaaagctggaagatgtaaaaaactccccaacttttaaatcatttgaagaaaaggtcgaaaacttaaagtctaaagtagggggaaccaagcctgctggtggtgattttggagaagtcttgaattcggctgcaaatgctagtgccaccaccacggagcctcttccagaaaagacacaggagagcctgtgagattcctacctttgttctgctacccactgccagatgctgcaagcgaggtccaagcacatcttgtcaacatgcattgccatgaatttctaccagatgtgcttttatttagctttacatattcctttgaccaaatagtttgtgggttaaacaaaatgaaaatatcttcacctctattcttgggaaacaccctttagtgtacatttatgttcctttatttaggaaacaccattataaaaacacttatagtaaatggggacattcactataatgatctaagaagctacagattgtcatagttgttttcctgctttacaaaattgctccagatctggaatgccagtttgacctttgtcttctataatatttcctttttttcccctctttgaatctctgtatatttgattcttaactaaaattgttctcttaaatattctgaatcctggtaattaaaagtttgggtgtattttctttacctccaaggaaagaactactagctacaaaaaatattttggaataagcattgttttggtataaggtacatattttggttgaagacaccagactgaagtaaacagctgtgcatccaatttattatagttttgtaagtaacaatatgtaatcaaacttctaggtgacttgagagtggaacctcctatatcattatttagcaccgtttgtgacagtaaccatttcagtgtattgtttattataccacttatatcaacttatttttcaccaggttaaaattttaatttctacaaaataacattctgaatcaagcacactgtatgttcagtaggttgaactatgaacactgtcatcaatgttcagttcaaaagcctgaaagtttagatctagaagctggtaaaaatgacaatatcaatcacattaggggaaccattgttgtcttcacttaatccatttagcactatttaaaataagcacaccaagttatatgactaatataacttgaaaattttttatactgaggggttggtgataactcttgaggatgtaatgcattaataaaaatcaactcatcattttctacttgttttcaatgtgttggaaactgtaaaatgatactgtagaacctgtctcctactttgaaaactgaatgtcagggctgagtgaatcaaagtgtctagacatatttgcatagaggccaaggtattctattctaataactgcttactcaacactaccaccttttccttatactgtatatgattatggcctacaatgttgtatttgttatttattaaattgtgattgttttattattgtttatgccaaatgttaactgccaagcttggagtgacctaaagcattttttaaaagcatggctagatttacttcagtataaattatcttatgaaaaccaaattttaaaagccacaggtgttgattgttataaaataacatgctgccattcttgattgctagagtttttgttagtactttggatgcaattaaaactatgtgctatcacatgtgaaaagcttaataaattccatctatcagtagtataggtctcaatatttattatgagaccagtggtctggaaacagcttgttgtaccgaatcaactggagtctatgcttaaaaaaaaaaatttttttttaaccatccttaaattattgcttaatggtatcatattaacatattctaaataagggctttaaggcacaggctgttgaagcattttctcagaggagtggatctgtagaagtctgtctttctatagaaatattgtgcttactcaagtgttaaattattttttctatgaactagtctacttcttaaaattcaaacatattcttttgatcacattgtttcttgagcatcctgccctgctactaacttttcaacaaggcaaaatggagtaaagtggcaatttctttagatgagtgaaataccctcaagtctcttttctgcccaaaaagggaaaagtgatagaaatgggggtggcaagtggggtgagtggatgaaggtgggtattgggggtggctgtgaaagaaaataatggagaatcacttttctagacatctacctatacttaatctaagaaacaaagtaatctactgtaaagtactctgccccttgaaagaagtattaaaaagagtgaggatggatttagaaaaaaacatgaatttagaaatattcaaaatggtttttgtggcagattcaatattatgaattcacagatatttaaagaatgagaaacatagtaattagtagaaatgccagaaacagttcctggttcctcttgtgtttgacactaagaaaatagcaagagtgtgaaatctcagatacttatgaaatctcacagatgtaaggactcaagtgtagaagaaaatatccccttcttacaaaaagaaatgtcaatttatggagtttgtgggaaatagggcaagaattcttatgcttatgagagccaagtagtcagtggaagagagtagagctcaaaactggattatcaccttagcaacttagaatagtttgaaatagaaaaaaagtatttaatttggatctggatctgttaagatatgcacagtctattttttgtatagtattggaaaataaaaatgctataatttg

SEQ ID NO: 303 - protein, 198 aa, Homo Sapiens
MSNVRVSNGSPSLERMDARQAEHPKPSACRNLFGPVDHEELTRDLEKHCRDMEEASQRKWNFDFQNHKPLEGKYEWQEVEKGSLPEFYYRPPRPPKGACKVPAQESQDVSGSRPAAPLIGAPANSEDTHLVDPKTDPSDSQTGLAEQCAGIRKRPATDDSSTQNKRANRTEENVSDGSPNAGSVEQTPKKPGLRRRQT

SEQ ID NO: 304 - DNA, 597 bp, Homo Sapiens
atgtcaaacgtgcgagtgtctaacgggagccctagcctggagcggatggacgccaggcaggcggagcaccccaagccctcggcctgcaggaacctcttcggcccggtggaccacgaagagttaacccgggacttggagaagcactgcagagacatggaagaggcgagccagcgcaagtggaatttcgattttcagaatcacaaacccctagagggcaagtacgagtggcaagaggtggagaagggcagcttgcccgagttctactacagacccccgcggccccccaaaggtgcctgcaaggtgccggcgcaggagagccaggatgtcagcgggagccgcccggcggcgcctttaattggggctccggctaactctgaggacacgcatttggtggacccaaagactgatccgtcggacagccagacggggttagcggagcaatgcgcaggaataaggaagcgacctgcaaccgacgattcttctactcaaaacaaaagagccaacagaacagaagaaaatgtttcagacggttccccaaatgccggttctgtggagcagacgcccaagaagcctggcctcagaagacgtcaaacgtaa

SEQ ID NO: 305 - protein, 1070 aa, Homo Sapiens
MCFSFIMPPAMADILDIWAVDSQIASDGSIPVDFLLPTGIYIQLEVPREATISYIKQMLWKQVHNYPMFNLLMDIDSYMFACVNQTAVYEELEDETRRLCDVRPFLPVLKLVTRSCDPGEKLDSKIGVLIGKGLHEFDSLKDPEVNEFRRKMRKFSEEKILSLVGLSWMDWLKQTYPPEHEPSIPENLEDKLYGGKLIVAVHFENCQDVFSFQVSPNMNPIKVNELAIQKRLTIHGKEDEVSPYDYVLQVSGRVEYVFGDHPLIQFQYIRNCVMNRALPHFILVECCKIKKMYEQEMIAIEAAINRNSSNLPLPLPPKKTRIISHVWENNNPFQIVLVKGNKLNTEETVKVHVRAGLFHGTELLCKTIVSSEVSGKNDHIWNEPLEFDINICDLPRMARLCFAVYAVLDKVKTKKSTKTINPSKYQTIRKAGKVHYPVAWVNTMVFDFKGQLRTGDIILHSWSSFPDELEEMLNPMGTVQTNPYTENATALHVKFPENKKQPYYYPPFDKIIEKAAEIASSDSANVSSRGGKKFLPVLKEILDRDPLSQLCENEMDLIWTLRQDCREIFPQSLPKLLLSIKWNKLEDVAQLQALLQIWPKLPPREALELLDFNYPDQYVREYAVGCLRQMSDEELSQYLLQLVQVLKYEPFLDCALSRFLLERALGNRRIGQFLFWHLRSEVHIPAVSVQFGVILEAYCRGSVGHMKVLSKQVEALNKLKTLNSLIKLNAVKLNRAKGKEAMHTCLKQSAYREALSDLQSPLNPCVILSELYVEKCKYMDSKMKPLWLVYNNKVFGEDSVGVIFKNGDDLRQDMLTLQMLRLMDLLWKEAGLDLRMLPYGCLATGDRSGLIEVVSTSETIADIQLNSSNVAAAAAFNKDALLNWLKEYNSGDDLDRAIEEFTLSCAGYCVASYVLGIGDRHSDNIMVKKTGQLFHIDFGHILGNFKSKFGIKRERVPFILTYDFIHVIQQGKTGNTEKFGRFRQCCEDAYLILRRHGNLFITLFALMLTAGLPELTSVKDIQYLKDSLALGKSEEEALKQFKQKFDEALRESWTTKVNWMAHTVRKDYRS

SEQ ID NO: 306 - DNA, 3213 bp, Homo Sapiens
atgtgcttcagtttcataatgcctcctgctatggcagacatccttgacatctgggcggtggattcacagatagcatctgatggctccatacctgtggatttccttttgcccactgggatttatatccagttggaggtacctcgggaagctaccatttcttatattaagcagatgttatggaagcaagttcacaattacccaatgttcaacctccttatggatattgactcctatatgtttgcatgtgtgaatcagactgctgtatatgaggagcttgaagatgaaacacgaagactctgtgatgtcagaccttttcttccagttctcaaattagtgacaagaagttgtgacccaggggaaaaattagactcaaaaattggagtccttataggaaaaggtctgcatgaatttgattccttgaaggatcctgaagtaaatgaatttcgaagaaaaatgcgcaaattcagcgaggaaaaaatcctgtcacttgtgggattgtcttggatggactggctaaaacaaacatatccaccagagcatgaaccatccatccctgaaaacttagaagataaactttatgggggaaagctcatcgtagctgttcattttgaaaactgccaggacgtgtttagctttcaagtgtctcctaatatgaatcctatcaaagtaaatgaattggcaatccaaaaacgtttgactattcatgggaaggaagatgaagttagcccctatgattatgtgttgcaagtcagcgggagagtagaatatgtttttggtgatcatccactaattcagttccagtatatccggaactgtgtgatgaacagagccctgccccattttatacttgtggaatgctgcaagatcaagaaaatgtatgaacaagaaatgattgccatagaggctgccataaatcgaaattcatctaatcttcctcttccattaccaccaaagaaaacacgaattatttctcatgtttgggaaaataacaaccctttccaaattgtcttggttaagggaaataaacttaacacagaggaaactgtaaaagttcatgtcagggctggtctttttcatggtactgagctcctgtgtaaaaccatcgtaagctcagaggtatcagggaaaaatgatcatatttggaatgaaccactggaatttgatattaatatttgtgacttaccaagaatggctcgattatgttttgctgtttatgcagttttggataaagtaaaaacgaagaaatcaacgaaaactattaatccctctaaatatcagaccatcaggaaagctggaaaagtgcattatcctgtagcgtgggtaaatacgatggtttttgactttaaaggacaattgagaactggagacataatattacacagctggtcttcatttcctgatgaactcgaagaaatgttgaatccaatgggaactgttcaaacaaatccatatactgaaaatgcaacagctttgcatgttaaatttccagagaataaaaaacaaccttattattaccctcccttcgataagattattgaaaaggcagctgagattgcaagcagtgatagtgctaatgtgtcaagtcgaggtggaaaaaagtttcttcctgtattgaaagaaatcttggacagggatcccttgtctcaactgtgtgaaaatgaaatggatcttatttggactttgcgacaagactgccgagagattttcccacaatcactgccaaaattactgctgtcaatcaagtggaataaacttgaggatgttgctcagcttcaggcgctgcttcagatttggcctaaactgcccccccgggaggccctagagcttctggatttcaactatccagaccagtacgttcgagaatatgctgtaggctgcctgcgacagatgagtgatgaagaactttctcaatatcttttacaactggtgcaagtgttaaaatatgagccttttcttgattgtgccctctctagattcctattagaaagagcacttggtaatcggaggatagggcagtttctattttggcatcttaggtcagaagtgcacattcctgctgtctcagtacaatttggtgtcatccttgaagcatactgccggggaagtgtggggcacatgaaagtgctttctaagcaggttgaagcactcaataagttaaaaactttaaatagtttaatcaaactgaatgccgtgaagttaaacagagccaaagggaaggaggccatgcatacctgtttaaaacagagtgcttaccgggaagccctctctgacctgcagtcacccctgaacccatgtgttatcctctcagaactctatgttgaaaagtgcaaatacatggattccaaaatgaagcctttgtggctggtatacaataacaaggtatttggtgaggattcagttggagtgatttttaaaaatggtgatgatttacgacaggatatgttgacactccaaatgttgcgcttgatggatttactctggaaagaagctggtttggatcttcggatgttgccttatggctgtttagcaacaggagatcgctctggcctcattgaagttgtgagcacctctgaaacaattgctgacattcagctgaacagtagcaatgtggctgctgcagcagccttcaacaaagatgcccttctgaactggcttaaagaatacaactctggggatgacctggaccgagccattgaggaatttacactgtcctgtgctggctactgtgtagcttcttatgtccttgggattggtgacagacatagtgacaacatcatggtcaaaaaaactggccagctcttccacattgactttggacatattcttggaaatttcaaatctaagtttggcattaaaagggagcgagtgccttttattcttacctatgatttcatccatgtcattcaacaaggaaaaacaggaaatacagaaaagtttggccggttccgccagtgttgtgaggatgcatatctgattttacgacggcatgggaatctcttcatcactctctttgcgctgatgttgactgcagggcttcctgaactcacatcagtcaaagatatacagtatcttaaggactctcttgcattagggaagagtgaagaagaagcactcaaacagtttaagcaaaaatttgatgaggcgctcagggaaagctggactactaaagtgaactggatggcccacacagttcggaaagactacagatcttaa

SEQ ID NO: 307 - protein, 718 aa, Homo Sapiens
MRAVLDTADIAIVALYFILVMCIGFFAMWKSNRSTVSGYFLAGRSMTWVTIGASLFVSNIGSEHFIGLAGSGAASGFAVGAWEFNALLLLQLLGWVFIPIYIRSGVYTMPEYLSKRFGGHRIQVYFAALSLILYIFTKLSVDLYSGALFIQESLGWNLYVSVILLIGMTALLTVTGGLVAVIYTDTLQALLMIIGALTLMIISIMEIGGFEEVKRRYMLASPDVTSILLTYNLSNTNSCNVSPKKEALKMLRNPTDEDVPWPGFILGQTPASVWYWCADQVIVQRVLAAKNIAHAKGSTLMAGFLKLLPMFIIVVPGMISRILFTDDIACINPEHCMLVCGSRAGCSNIAYPRLVMKLVPVGLRGLMMAVMIAALMSDLDSIFNSASTIFTLDVYKLIRKSASSRELMIVGRIFVAFMVVISIAWVPIIVEMQGGQMYLYIQEVADYLTPPVAALFLLAIFWKRCNEQGAFYGGMAGFVLGAVRLILAFAYRAPECDQPDNRPGFIKDIHYMYVATGLFWVTGLITVIVSLLTPPPTKEQIRTTTFWSKKNLVVKENCSPKEEPYQMQEKSILRCSENNETINHIIPNGKSEDSIKGLQPEDVNLLVTCREEGNPVASLGHSEAETPVDAYSNGQAALMGEKERKKETDDGGRYWKFIDWFCGFKSKSLSKRSLRDLMEEEAVCLQMLEETRQVKVILNIGLFAVCSLGIFMFVYFSL

SEQ ID NO: 308 - DNA, 23213 bp, Homo Sapiens
gcggccgcccgcgggcggagagggggcggcgcggcggcaaggcgcgcgggcggggcggggcgcgccgagggggcgtggcgcggcgtctgcgcagctgccagcgcctttaagcccgggctcgcgctctcggaccgtgctttcgccgcctgggagccgtccggcgcagcagtttctaggtccccactgtccccgccgtcccgccccttcgcgtcccgggaaccggttggcttccgagccgcactcgccgatcctccaggcatgccccgctacgagctggctttaatcctgaaagccatgcagcgggtaagtgaccttccctcagagccggttttcccgcgcgggcgccccctgtgcttgtcatgacccctatattgaggttggcaaatagatgtatgtttatgtgttgaataaaataattaataaaataattaaggtacgtatatatagttttatgactggatatggctttgggtatgaaggcttctgctttatagaaaaatgctgatttttttgttttctattataaatgagtagaaaaaccttgtaagatctgaaatgaagatactggatgtgttaccatagaataaacaaagactggcattgggagactagaaggagctttagaggcagatgggactgggttttggattgtagcacctacttcctaaggactttaaccttctggatcctcagttccttctttgtaagccggaagtaattcatttgggagggtatttgaagataaagtggttatgtgaccttggaggtagttaagtgtagttctgtcattaaagtagctttgtggtcttaggcaagtcgctgtgaacttcattgcctagtttttcattattcccagtttattaatgaagaaactctaaaagataaaacttattatatctaagtttatttcatcagaatcccaaactagatcaaagctgaaatacagttgcttgttaagtaaatgtttgaattagtggtgttggtgcttactactctgctcccatctattattgccatgaggggtgtgggcctggttttgccagctttttttttctctcttcctcctaccagccagaaatccagattttataggaaatctggttttttttttttgatgttgccaactaattgaatacttaggtaccatggatcaaatgtaatgtatctgtgggttaggttggctctcattttgtaatctagatattcagataattagctgtaggttgtctgtaaatctcttagcatttatgttgacaaagcccaccttgttaattggtcactggtttgcagtaggactgatttcagcaatggcaggcatattcaattcttgaaagtatctatagtttcggattgttgggttgtatatgtgcatttaggctaaaatatacatgtaggcttcagagctgcaccgtgtaaactgtgagggagtgacattcacagtccactttttctttcaatgtctgagtgatatcttgttttaggcatgtattagtactatttggtttgtacccattgtattaacctcttaggtgtttgaaatactactggcatgcaaagattgctttgcctagaaaatatttttttttgctcagagtgtatctgtggaattaaaaatagtttacccatgatccctggaaaatagtattaccatgaaaaaaattcaggtgctctcttggtaaagattatagaggagggaggtgatgacatttttatttttgaccaggctttgtgtttccataaaatagaagccaagttattaccttgactaaccttccttttttgtcttttttttcactcccactccagatagataacatcaaattgcaaataaaacgaactcagatcccaggttgttcttacgtacgttttggcccaaggtgtaattgacttgttttgcttccccttgcaatcatttttactatgattacagtcccaggtaaggtaatttctgtccactttgggcatacctcagtagaggttggtgtagatgaaagcttaaaaatgaaattgcaagtgaaagcacagacttagcaaaacttctttattggagccctcaatcctcataaactggcatttttctgcttctgccccagaatcgagaattcctggttttgtctttgttttgacttgagtttttaaaagtttctctgtaacacctaccctggagtggttaagtgctttaattttgtcaggtgaagaaaccaagtgcagttatggtagccgggttgctgtggatataatccagtttgagaaaattctcattgtggtgatcagaagtgcagtgttgtggttgcatttcagctgctgggaagatgctcttgcaaatccatgtgtcgtctttgcttccgttagaaaggtgcagaatcagtgtaagttccagatatctgctcccttttcattttgtgctcagatgccccgtgtatgaattccgaatataaaacatctgttcagtctggttttgattcagatttaaggtgaatttctgttgctcagttgaaaagctaaatttgagtgtaggctctgtcaggcatgttgtaggaaaggtgtatggtactgaagtgtgtggttttgttttttaactgcttgacactgttaagtaagcaaatgacccagtcatgggttgttttgattgccattcttctgttggtgtactgcttgccttctgttttgttaatagtcatatgagaaaacagttgtatgaagtatagtatcttgaagctttaagacaccaagtttccattaggcagcctaagtctcgcagactttggtagcactgttggtctcatgggaatgccattctcatgtgtggactaagtaagggccaggagattttgcaaattttgtgtgtgtaagaagatcgaagaaaacatttttcctaatgtcactgtcttgagtattttatctgattaggatggactcattggaaactattgataatttcaagatttcttgtcatctggcatacaaagaaaacagtcgtgaccctatttccctggatttttctatccctctacttgtcctgtgtttgcaatgcaagaggaaaatccagctgcctttataatctagaataccatgtttctgtttttatttcttaggtttaattcagggcgtaatttctaccagtccctccaaatactgttaaagttactctttttgtggtcttacttcttacttcttgagtgttatattctccaaaccttggagaaaattagaaggttttaaagttttccaactgaaaagtatctttcagaggaaataccctaatttctgaatcttctatttataacttggcctggagaattataatctggtctaccaggaaggtgcttgtgcttaggttttctgccttagtcacatggaaagatgagcagaagcgattccttctagaaacagtttttttctagaaacataaaattggaaccaagtagactgagaacagaaaaaaaacacaaagttgacctggtaggatgttttacctctataaacctcatagttgctagcctttgagggaggctagatgagttgataataatgcctaaccttagcaatggattgaagtaggggtgcaggggttatgtaggtgtgtatatgtatttaggatatatatacacacctacatattatacacacacacatatgtacaattctcttgaatcctcagccatctaaggttaggtagagctatttccgtgttgggaatggaaaaactgaagaattaaaacacagacttggtcatacgtaatggtaaatacagtagtttaatgaaattttgtattgtacctatcactcagcttcaactgttaatttccagtctgctcacctctgttttctttatcttaaaatttttttcattaatttcccttggctaacatgactaaaaaaatttcagacttaaagagcagttcatttaacacttgtatgatttttgcctagatcactaattgttagaatatgccttattttatctttttttaatctgcgttatttcgagagttgcagacatcttgacatacctttcttaggaataagggccttcctcctaaccacaacatagtcatcacattcaaaacggacattgatacgatactaccaccaaatattcaattcatatagaaatttacgctgttcttccagtaatagtttttagtgttttaattcagtattcaatcaaggatcatatatttacttgtttagtctccttgaacagttccaaagcctttgtcattaataacagtggcactttgaggagttttggagtccaggcctactgttttgcagaaaccctcactttggagttgactgtagttgcgttttcatgattagagttagattagccattgttgacaggaatgagtatttcatagggatgtcaatgcatcacaccgggaggcataccactttgttaagcagtcatttggttaggtggcattcaccagaatgggccattgtaaatgtaccctatttcccttttgtattaagtgatctatggaataacaaacttgagactgaatattttgttttccaacaatctgcattggttttagcatctgttggtgactgaatcagttattgcaggagtactttaaagcaaacttagatatatcatttcacctgtaagtaattagtgtataagaaataaggacttttttttttttttttttgagactgagtcttgctctttcgcccaagctggagtgccagtggcgtgatctcggctcactgcaagctctgcctaccgggtttcacgccattctcctgcctcagccccagctgggactgggactacaggcgcccgccaccgcacccagctaattttttgtagttttagtagagacggggtttcaccgtgttagctagggtggtcttgatgtcctgacctcgtgattcacccgcctcggcctcccaaagtgctgggattacaggtgtgagccactgcgcccggccagaaataaggacttttaaacaaccgtagtgcctttacacctaactacaattccttaacacctcatgttcatgttcaaattccctgaattgtcaaaagtgtctgtctacagttttggttgactctgaatctaaacaaggtccacaaattatgtttgcttaatgaccttaagtctcttactctgtaatagcttcttaccccactctttacctttccggatttggctggtcacttatgctgtttatatatattcttctattccaggtaatttctgtagacccataggttctagaaatttgattagattcaggttttgttttgttttgttttgtaagagcacttaagtggtcttgggagggatagatcacatcaagagggacacatgtctgcattttagagaaaaattaatcttggtgtgggtacagatgttagcagctgcatgcgtccattttgaatcccccagcagcctttctcctgaaaattgtagcatccctgtactcatagcctgggtgcattacttcagggcttaccggtggtgattttcctcattacattagtccttttgcatcagttagctggattttatctgacttgtgtttattcctagtttgtgtttgtgtgtgtgtgtgtgtgtgtgtgtgtgtgtatctccctgaaaggtgttgtaaaaggatgcgttctccatctttatttcaaaaaggatgttcatgaactcccttagtgatcctctcaaatgtcctcagttttctcatttgtaaattggggatcattatcatgtctgcctcttggggtttttgttaggattaaatgagctcaaacatgtagtgtaaaaatagtggttggcacatggtgtttggtaaatgctagttactaaggtaacttctttagttttgtgggaactctgaactcaagttgtaatggagaggtggaagaggattcttcatgagttgacatcagggtgcttgggtttctgttgggtgagctgaagggaattgttgcttgccggcactgacctgctctttcagctgtgtgggaacagttgccagacagacacgcacagggaaggtctgcacatatcactgcacactaagaggtggatgtcgacagttgcagcagtaaaacttgaaacacgttccgcagtggagttagcacagtgaagggaagtgggccagactggtggtaggtggtaggttgagggagatggtggctccagatacaggtttttactatgtcatgggccactgagatttttatctgaatgaacatatttgtctagtccagtttgccttgtcattacacataccctcaactggagctatttgagattgcagatcactggtggaggagggaggaggctctttttccctttagcctctttaatctgcatctcttgttgcttaaaaaaccactgttgatggtaatataggatattggaagtttagcagtcttgatggcgaagaacttagttgttaatatttgatttttttatttaacaaacatttgagcacctgtaatatgtaagatggtgttctggacactaggacacatcagggaacaacacagaaaattctaccctcatggagtttacatacatggtagtgaggagacagaagaaacgtttaagttttatagcgtgttaggtgttgagtactatggataaatacaaagttggaagggaggcattgagatggtcagggaagttacttttgtgcaaagacgtaaaaggagaggagacaggtcttgtggaaacctggggttacaaagtgttgcctgcataggaaatagccagtcccagaggctagtttggtccattgtgatgaaagggttgactgcttgctgtgctagtgccctgtagtgggccaagggcagaagcatggagacaagaggctgggacagtgatctggatgagatggaatggtgatttgaactaaggtgctagtagttgtctttgattctggatatattttaagtatcgccaacaggctttgctgatggattgattgcatgtgggttgagggagaaagtgagcagtcaaggatgactaaaatttttggactgagcaatagtgaggatgaagttgctgttctgagatggggaggattgagagtagaacacattttttgggcaagagcaaattattcataccccggaacaacaggcaactacaacacttcatccattaagagcagttgtccataaattttactgtgagaacccttgcatttgtagattgtacagctaattcctttaacttaatgttttaaagttgtgggagttgataaagattggcttagatagaatctatagctgtgatgactgggtcaagtatagaatacacttaagacttactatttttccccttctggtggaatgactaattaacactgataaaaagaatgaaggcagaaagcgttgaacttggatggtgagaacatagatacgtctggtcttacagctgacccatcagggctttgctgtatgtgaagcctatgcctgggacttctttttacttttaatctctgcattttatccatacacatccattcacatgatcacacaaagatttcaactggtttttatcttacgtgctgtttgcagtcttactttgttaacagttgttacatatccatcttgtgtattttcaagcacaactttttaaacacgcatgatcttttatcaatatcgttaatgtttcttcctgtcagtaatgtccttttcactgaaggtagtattgcatagtgattaagggcaaaagctgtttagacatatagatgtgaggcaacatcctggctgtaacacagacagctgtggcctggggtgagttatactacctcatggcttcagttttctcatctgtaaaatggtcataataattgtacttatctcatgattgttataaggattaaagtaatgcacataaaactagacacagtacctagatggtgttaggacttaggttagtgtaagatttttttttttttttaaatttccattatttataactcacttatctttgataaacagtcttttacaagcagatagtgttgagcctcttgaattcttattgagttacacaaatgtttggttaagattacatagtaataggcattgctgctctgttatttcatatttccttttctttttgagacagtctcgctctgttgcccaggctggagtgcagaggtgtgatctcggctcactgcaacctccacctctctgggttcaagcgatcctcttgccacagcctcctgagtagctgggattacaggcgtgtgctaccacacctggctgatttttgtgtttttttagagatgaggtttggccaggcaggtctcgaactcctggcctcaagtgatccacccgccttggcctcccaaagtgctgggattacaggtgtgagtcaccacgcccagcctgttatttcatgttttcatttatctttaacaaaatgggttgttgggagtttgctcctatatgtgatctagtatcattcacataaaagttaaaaccagtagtagtttcatagttgttcttccctccctgactgccatatctacaaggtcttatttctctgagatttctataaaaaaattcatgatgagccaaacttattggtagaatcaggttaaaatgaatatatcttgggcggagtgtatatggatgaagtaaatctggtggtttatgaacttttctaggtgaataagattttatttgaggaaatggtttactttggaaattatccattcttaacccctccccactcctgtcccgggagaaactgataaaagtagagctgttctggtggtagagggttggaaggagggccgcagtccctccctactctgcctcaacttcacccatcagaatacagcttcagcaccatttgagtccaatcagggttttgtataattaataacttttaaaaagttgagggtgcaagtttaatagaaatgttttgtcaaaaagatttaagggcaaattctttatattttagggatggttaaaacattacggtacaggttgaatatcccgtatcttaaatgcttgggaccagaagtgttttggattgtgggatattgcatattacttggtggctgagcatcccatatctgaacatcccaaacccaaaatgctccagtgagcatttcctttgagcatcatgtcagttctcaaaaagttttggatttgggaggagcatttcagattttgtatttttgcattagggatacttaatctgtagtgttgtctttagctccacttacaatttaaaactggctggagttcaggccagttatattaggaaaacctgttttgctctttgtgttactgatgaaccgctacagtatccttgctccacatttttaaagtaagcaggggttgaggacagtcctatgtgagtacacatacactctgcatcaagcgttagtagtctattccaccacaggaatttgctttcctagaacttgagtcaaggtgacaaaagtgaaagcatgtatgtaaagtcttaagaattttatatacattttttctttttgtattttacttgaagtgatttaagtaggagctaatagttgatgagacagttgggagtctaaaatgtttgagagagctgcatctttaatgcattattttatctaatctttctatatataaataacttgggaaaatcctaatatgccttgcacatagttgacagtttaatttgaaaggaactaatatcacttctagtatattcaggttgtagggagtaaactgacatttactgagccacctccccattgcactgggcaatactagctttctctgttacttattccttataaatcataaggagcaagttggtttcattttaaaagccagacagttgagacttgttgaggctcatagagatgaagttgttgcctgagatcctacagttaggaagtgacggagcatggaacccagcccttaaaaactgtgctgttttcttctgtaccgtgccacctacatagatgtggtacctacacccacctcccttcttacagaatcatgaaatctgtctgttggggtggggagaaaacaagcttgggtatgcccatgttttttgtttttggtaggttacacaaaagtgattgtaattcaggtaattagttttcagaggtgtctgtgtgttctataacccttcaattattagctggctaagtgaatatttttcatttggatcagaggatgagcagggctcatcaagcttaccattgacagagtgctggactaggcgtctcagattgtaccttgagtgtgtggtttgtaaattgactccaaagctaaaagaggtggttgtttggtcacgtttaagattattgcgtactactctttgcaggccccgccctgtgtcattgaacttatgacttgaagccctgagtataggagataatttttcttgttccttgtttggttttagtggcaggtggttttttattttattatttttttgatagagtgcccatatatcctgctgtttacatatagttccagaataagtttctggtttggaagataaattatatggtcacccagacagtactagagagatctggtcatgataactaattacattttggttaacatggttatatcacctgaaggagtgcttatttaaatttggtcttacctttttttctctttctatttggtcaaatgcagcaaatatttatatttacacttctctatttggattaattcttcagttgcaatttaatttatccagatgcgtggaatagaaccaaaactgcattctaattctgtgcaaaacaataaaatactactttctgagaaggatgccttctcttttgggaagaaggggaatctgctctgtttcaaagcacctttgtgttcaaggtttggctaaatctgctcatcaccactaggggactgtttctttttgcattctacaagtattactcccattacagaagctttttaagaaaaaaatggactaccaaggaacccacctacatgcttttcataactatacctattttattgtcttataatttgacttgagaggtttgcgtgaatgatgaactgtgacaaaaagcatatataaatataaaaatacaagttaaaaagcctcatgttagctgaagattttccatgtgtattcttataaaaataagggaaccctggacagtgctcattgtattttgttgaagaaatgttaacttctttaaaagggaggaaaacatatatatatatatataacatactgtatattcagaaccatttttaagggatgtagtttatctcttgaaagactgaaattcaaggctgtgactatgactagagtgtaaaatatagctgcattgcattatagtattttatatatttgtacaaaccaaattgacctgtttttggttttgtttttccttttccagtctttaccaggtgctggtctctgcatgtgttttgttggaagttggaaaatgtagacacgacccacagagtggtatggtatccagtgagaagggaactgtccgcagtggctttgaaggatatgaggaagcctaggcggagagttgagaattcagccttgagctagtgttagggtactatttggtacctctcctgtgggcagagcgactttactagagaagttaggagttagggctagcatgagaacttcatgcagtttgagcattcatcaggcagcagaatatagcttctatatttaccttgcataaatcagatttgacaatgaagaacaatgttactgatagtaacagtgcttcccagtgattgaggaagtgcttgttttctttttcagcactttgttctatgaacaaataaggtgcagcagctagtatgacacataacccaccgtatttcccccccaacggccagatgaaaccagaaatacccactgtgtttttctctcccttctttggaaagcacgtggttggtactgccattgggaagagtgatacctgattagccaggtagccttctgaaaattgaaacaagtggcctgaggatgacttggatggctgttgggtagcagagagccctggaggcagggtttcataactgcgaacagcagttttcattgtaattgacacagcagatttcattgtaattgacaagcttcccttatgcagaaacatttaacgatacctttttaaataatgtttactagtcatctgattagattttattaaaaatttagatgattcgtcctacataatgtcaaagcatttgtttaaaaacttggaagcttttgggggtggggaaggtggtcatagaaatatgatcatcttcaggatttggcaggtatgaagtgatacaaacctcaacttttaagatttttttttttttttttgcttttctctggcaatcaatcttatttatgccagccgttgacacttagaaaggatttaaatcacttttcatagcataattattgtattgcttaatgctttaaaaaggcacgcagatgggattgagacatttctatccaggcagttttttctgcattagacctaagaacctaattttgtagggcagtagtctctaggcattatgtttagctccttttgtcagtgagaagtgtgttgtaaagtttctaatactgtggtctgttttgaacggttttgagaagaggtagctttagtataatttataggacttaaaaggaaaatgcctagaatcatcagaaaaagcatggaaaaacattcttctctgaggttgccttattggaaaaggagaaatcatttagaagttaatgtgtggaaggcattaggttgaataaaattgttgttcgtattgatctgtcagctgcaattacaattaactgaaaatttagtatttgtctctttttcaggagagaagccgtcaaattttaatacatttaattttaggtatatttaaatgtctgttttgcagagtgattatcttaatccagaactgaaaaattcctgatggtcctactgaagatttatctaatggtccacaaatgtctgttttgttgaggtttggcggacataataataaatcattttttagtcttctgaaaacttttctcctcctccctcttttctctgcttcttatacccttcaacaaaaagcattaaaaggaaaacataaaatcacgcctttagtcagtgccgttatcctctcagaggttgttttggaaatactgcctgatgaaaaggaagagaaggaaattgcttcttttaaagtttgctttttatcttcttgcagcatcttctaactggcagaaataatacaatttttgagttgttttgtaagttggatatttttagttttgtgtggaatgtcgtgtttcccattagggcagggggcgtctcacaagatctaggttactgtatgacaactatatccatttactggagtttaagaagctttataacaatacatttccagagactaggcagtacttggttttctgtatttaaattttctgagggtagatgataacatctagtaaacaccacctgcctgttccatccaggaccctaactggccataaagttacccccaaactctcctaggattcatagtattttaagatttcatttttgtgcccttattacgaatataattagtgttttctcccctttagggtgctttaagatcttagtgcctgtcctaatctgagcataccacagtaagacaagaaagggcaatgctgtggtaggcagttagctgctgaagttaggccacttagttatgaggtagatgaatttctgtcctcagctcaaaatgataatattctcactgacaaaagtatcagctgtgatcatatagattgctctttcctgtggaactgaagtgtattaaaaaaattttttttcttccaataaagaatgtctcgttgcgccgggtttgctagactgaaagtttcctcatcacgtggcgagacctcctctacttcaatctttgtcttttgtctctgctgccttgcagggttggtacagtaggcttcactagacttagctgcaactcagaatttctcctccagcacctgagtaaatgctgatggtcttgtggagagtggattaagagtacgagctaagttctcaatcccaattaagaagcggaaaatttaaactgtcttcttcaaagtttatcacaaccaccaccatcaagacagcaaaccaaaggacaaagactttgaccctgctgtgttgctctgtgtagtccagttcacgtatggtttacagacttggctggggttactaaaaataaataaaaagttggacacttctgtcattggagcgctattattcacaagttaccagaatgagagctgtactggacacagcagacattgccatagtggccctgtattttatcctggtcatgtgcattggtttttttgccatgtggaaatctaatagaagcaccgtgagtggatacttcctggcggggcgctctatgacctgggtaacaattggtgcctctctgtttgtgagcaatattgggagtgagcacttcattgggctggcaggatctggagctgcaagtggatttgcagtgggcgcatgggaattcaatgccttactgcttttacaacttctgggatgggttttcatcccaatttacatccggtcaggggtatataccatgcctgaatacttgtccaagcgatttggtggccataggattcaggtctattttgcagccttgtctctgattctctatattttcaccaagctctcggtggatctgtattcgggtgccctttttatccaggagtctttgggttggaatctttatgtgtctgtcatcctgctcattggcatgactgctttgctgactgtcaccggaggccttgttgcagtgatctacacagacactctgcaggctctgctcatgatcattggggcacttacacttatgattattagcataatggagattggcgggtttgaggaagttaagagaaggtacatgttggcctcacccgatgtcacttccatcttattgacatacaacctttccaacacaaattcttgtaatgtctcccctaagaaagaagccctgaaaatgctgcggaatccaacagatgaagatgttccttggcctggattcattcttgggcagaccccagcttcagtatggtactggtgtgctgaccaagtcatcgtgcagagggtccttgcagccaaaaacattgctcatgccaaaggctctactcttatggctggcttcttaaagctcctgccaatgtttatcatagttgtcccaggaatgatttccaggatactgtttactgatgatatagcttgcatcaacccagagcactgcatgctggtgtgtggaagcagagctggttgctccaatattgcttacccacgcctggtgatgaagctggttcctgtgggccttcggggtttaatgatggcagtgatgattgcagctctgatgagtgacttagactctatctttaacagtgccagtaccatattcaccctcgatgtgtacaaacttatccgcaagagcgcaagctcccgggagttaatgattgtggggaggatatttgtggcatttatggtggtgatcagcatagcatgggtgccaatcatcgtggagatgcaaggaggccagatgtacctttacattcaggaggtagcagattacctgacacccccagtggcagccttgttcctgctggcaattttctggaagcgctgcaatgaacaaggggctttctatggtggaatggctggctttgttcttggagcagtccgtttgatactggcctttgcctaccgtgccccagaatgtgaccaacctgataataggccgggcttcatcaaagacatccattatatgtatgtggccacaggattgttttgggtcacgggactcattactgtaattgtgagccttctcacaccacctcccacaaaggaacagattcgaaccaccaccttttggtctaagaagaacctggtggtgaaggagaactgctccccaaaagaggaaccataccaaatgcaagaaaagagcattctgagatgcagtgagaataatgagaccatcaaccacatcattcccaacgggaaatctgaagacagcattaagggccttcagcctgaagatgttaatctgttggtaacctgcagagaggagggcaacccagtggcatccttaggtcattcagaggcagaaacaccagttgacgcttactccaatgggcaagcagctctcatgggtgagaaagagagaaagaaagaaacggatgatggaggtcggtactggaagttcatagactggttttgtggctttaaaagtaagagcctcagcaagaggagtctcagagacctgatggaagaggaggctgtttgtttacagatgctagaagagactcggcaagttaaagtaatactaaatattggactttttgctgtgtgttcacttggaattttcatgtttgtttatttctccttatgaacttaaggatatggtgagacactaacttaagacaatactgactggtctttggggaaaaaagttatgtaactgtgcatctctcaggcattgtttacgctgtaggttttagccaaattttacttagcagaaaatcatctaattacaagactttattttcccagagatggattaaagtaaatcttcaacttaagtgaagccaaacctaacagactgaattgtgcaaatgtggttttaaattttgcataccaaagtaagaagagaccaattattctcacagagcacttagagcagaatatatgttaagttaccatgaattaaggtatactgtctgcactgccaagtcttggcagaccttaccctgaagtagaagatttgctcatttctaaagttttttttctgtctctgtaatccctcctaccattaagaaaaacttatttcttagacattgtacaatcagttatgtactgaaaatcgaatgtgcttgtgtgatacttgtttcaggacaagttcatttgccaggttcattttgttagcatgagcctacggattctgatttcccaaagaaagaatgttttcctgtaggtatttttgtaccaccagtatatggaatgttagggaaaaactttgttccagttcctttttttttttctttctactttcaagtttaagtgaaccatactgaaatgaccaacaagtctgcctgtaaagttacatgtcatgattgtgttgttaaatgattatgggggagaaaatgaagtaaatgttgctgatgatccccatatttattgatcatattaaggttgtttatatagtttggaaatgaccagccccctaagcagtgtttgattaacttatgctaatcagatgattactcatatattctgctaattttctagctttattcttgttatttggaaaaattattagccaaatgccttcctaggtggatccagttggaagatatgtccagaaacctgaagaaaaattgacgctgcctttgtgtgctggattgctctacttgattagatcatgatatatcaaggttgaatttttagagggaaaatttaattctgatatcttattgcatccttgataagtttttccctgatttttttttcctccaaagactttccatctggacacagcctccacatttttgttgtagtgacttagagcataaggatgtttcagtgccaattccggccgtcggtaacagaaaactcagtgcatactttgctgttgttaggttgtcaatatagtctttctgtaggatggatagcatgtttgagaggtgccaaacaagaacttttggggttagtagtgtgtcttgtggagggtattacaggactgtgtaattataggactctaacttgacatggcttggcacccacttgcagctagtgggtacagggtacaaaagatgttagagaaaagctctacagattacgtacttctgtgtcttcgtatgctcaacactgtcctttgtcctccatgaaagatgaaggaagcaaattatgtatgtactttctttgaccttctttaatctctgatactttttagattgcatgattttactaggcttgtatttagggaaattactttcataaatacttttgtagattttgaatcaaaactcagtctttttaatttttttgtagtctataaactagtttcattatgatggacttgattagtccaaagttaattttagaaattgtcaggtagcatagtgtcttcccatgatcaggaggctttctgaaggactgagtctgtaaatgaaaaaataatttatgtatgaatagcatgtatttctgaagagcttagagtgcctcgtagaatttttctcaattttattcttgaggtttataatttgggggccaaatagatagagctcatcattttcttgtttggaagttgaggctgcgacatgtccaaggttatgaagtctcttttgggaagaacagaaaccaggtctccaaatctggactcatggtttgttcagatgtgtctggacaaatggttgtcaatgttttgtcctgttttttcaaaggaactgttcttcctttgggacaaccttttggtgtttgggaaagtaataagatcttggatttttcaaattaacattaagttgtaagaactaaaattttctttgaaccacactactgtgtaattcactgataattgacatattggctgggcagcctatctcttccatatccagcgtaaatgaataggaggtgtctgtgattttttttttctccctttatttaacattgagtcctagtagtttggagaattagggtccctctaccttctttctgctcttgtcttagtaagatacataaggtacatcatcttgtgtctgtgtgtatatagcagtaggtcaagtttagagtactaaagtctgtaaataaggaatgactattagcatattcattagaattgtttattcttgccagtataaacatcattttatttagactaaagtccctgaagcttgtctttcttattgctttccagtaaatagataatgtgctcgagtaagtttgtgaattgctgattgcaacttaattcagggaccagtcttcaatctatatttcattagaatgattgtccctggaatgatcatacatggactgtcttaagctagcaaaatgttcatactttacactgactaaatgggtcctaaatgatgacattggtctttagacattaacatgtgtatatttttatattagctcaagctaaggttcagaattgaagcttgatattgactagaatagctaaaagtcaaaatgaggtgaggacactggtcttggaaggtagagaaaaataaatgtcttaccaggtgttaatggtatccccagttcttagacttttgtcttctcaggcaattttcatctcaagatctgatgagaagggcatattacattggtatgcaggatgattattgcatattttgtgggacctctaatttccctggtcatctttcagaatattctgttctgccacccccagagagtaaacacttgagccgatttcttcttccccagctattctttcctgggggtaattatgctttgtctttagattagagaagcatcaagcaatagcaatggtgctgtgtccttcggcctaaattcaatagatctcatctcctagggcttccttttcacttggctcaaaggatccattgtattttggcacaaagagcctggccagggtcatgtagccatagctcttagggatgatacctcaagaaattagctgggacccatcactctgtgaaacttcacattttaagaactgagttgagggggttgttatgcacttctgtaacttgaggctaagcaaggggttaactcttgtgagagccaatagagtgtgtctgtattcgcagtccatggctcattttctttatagtaggcatatggatcttcccctctgactttgaatatcatttggtgtggcctgtgggttattttcattctttaccaccaaataaagcggcttattagctactcagttacttgctactcaaaggttaggtcttccctgttcctgcttggcagtgttaaagcttacagggttaacttatgatgattctcctggctcattttcatcagaggcatgatgactggaaagggatcacatgggtcgttggtggtgacacctcactgtttcctaggtttggatagagagatgtatacaagacctttcctgttaaattacgtgactacagagacttgccaggacaaaatttcctaagaaatcagaaaaatgattaagtgagataagtacctgggtgacacagatattagcccgttggtaaaagacaacaaatattagcttaaaatctgcatatgtagaatcattttcattagatttagagcttgaagcaccttggctctcagctactttaaactcctccccatataaatcagggcaccaataaataagtttcagctttttaaaccctggtttgatgttaagcattataaagtacgaagtttgttaccacagtagagataatttagtagaaaaatgctttgaggcttcagtatttgtaagattttgcattagccagatgctaggttgttgaaggcatttcagtgttgataatagcctgagcagacttctttacaaatgggatctgtttctatatgtgtatatgcccacttaccattcagagagactggtctttctctttgtctcccttcacattgctgtgtcagtcctacacctagtcttttcagcacttagcaaattcaaatttggattttttggtcagcttagttcactttaaggcatattggcatggtgtgtgaaagtgatgtttggccccagtattgaggacttttagatccaaataatgactcattaaatataattatgttttaagtatactgaatttctgttagcttaaaatgttaatcctcaggaatgatttcctcacactttgtgttggctaataataaaagcactgttttatcctcaaaactcctttttcaaaaattagggagagagcagtagtgatcatttatgtgagcccctttgaaatgatggtgtcagagtgcagagaaacaatggagttttgatgccaaaaaggtttttttgcagtaaaagtaaaaatttggaattagttggcatataaaggaacccttttgtactggaacgtatgaggctggattgtgaaaaggtaatctttcgattgctagacttggttaacttagggctgcaaatctttttcttctatcaaggtcacttaatatggaatgtttttgtcagactgtcctttgttggaatactttagctgttcagctactttgactcctaggagagaatttagttaaggttcaaagtaattaactggctttgccagtggtgagtcccacaccattattcacttagtagtcatataaatgtttttatttactctcttcaatgctgagaataaggctttaaattactgattcacctttaaaggaatgttgtgagaattgatgtaatttctgtttctgtttccatctaaacttctttataaaaagagggattagtttttttgttttggggtaagcacctaatttatccagtaaccaacaaccctaaccattggcatatatagtctttcactcagaaataaacaaaaactgtttggtatatctgtatcattgctaatcttgtgcactttactttttgggcagtaccatacatagtctgaggctattgacttaaaccaataactgtactttatgtaatgactcttaaatttggttacctgggttcacagcttgcttgaagagaaaggatgctagaataaagtaagcagctgaagagcgagcaaatcaagacaaaacacagtggtctcagatttttcgtagtgtgggaacagtggttttgctctataccactgaaaagcactataacataattgttgtccatgatactgaagcttttcccctcacttctaggttgtttacattcagagctctatcaataagaggaatacatattacagtgaattcgacaaccgcacaagttggcagtaggtatccccaacctaatttatcttggtaaattcaccctgtttcctagtgctgctggataaaagagtgtttactttttattgctcttagacagagtagtctagataagttttcaatttatcaacatagcctagacttctgtaagtggaatgttcattagtaactcatctttttgttgttataattggaaacagaaacgaggcttattgctattgcagaaatcccaaactggcaaaggccagtatatatggtattccataatataaccagcttttgaaatttatgtgtttggattagtgccttctggttaccagtattgactctgctagtttgcacctttccgttcttaacagaaaatttgtatttgttattcctcttaaattttgtcgtaactagtgaaggaagtaaaaaaaaaaaaaaaaacatgcattacattgacatactttatgtgcagcctttatttaggttcagtgaaaccaggtagttctgtatttgtgttgtagcctaaatgttgtttcttttatatccattaaaaacttaaagttacttatgttctgtgatcttaattttgttgtgtttccattgtaggttgataggtatatcgagaacaggtacgtgacaacagtttatattccatgatagaaagctaaagtccatagaaagcacaaaatcgtgttcacacattagtgtacccacacatagaaagcacaagactaatagtattctctgtatcccacaagtgccagtcataaaggccaccaggtatttgtctcagagttgctatgagcactacagtattgataagcccaagacaatgcggtatctaaactggtcctaatggtaagggacccaaaggaataatctcaataagtttgtaccacattgatggagggagagaatacaaatgtcaagaatgccaaaattatatttgggggttactagctaaaatggggtttgagggctttttactgcaacttgaaactggagaaatagggacagatgtctaggtttttggtgggtggaacaggtgacatatttctgttttaagctgtagtgtgattggggttttttgtaaaaaatcttaaatcttttaggaaatattacctcttaacagtgcccccccaaacatgcagaaagtcatactttaacagggcaaatactacttgtctttgattttttttgtgtacgtttgtatgtgagagatgaagttacctttatttttttcctatacttgactgtgcttcattttaataaaggataatttgatctga

SEQ ID NO: 309 - protein, 359 aa, Homo Sapiens
MSLQRLLQHSSNGNLADFCAGPAYSSYSTLTGSLTMNDNRRIQMLADTVATLPRGRKQLALTRSSSLSDFSWSQRKLVTVEKQDNETFGFEIQSYRPQNQNACSSEMFTLICKIQEDSPAHCAGLQAGDVLANINGVSTEGFTYKQVVDLIRSSGNLLTIETLNGTMILKRTELEAKLQVLKQTLKQKWVEYRSLQLQEHRLLHGDAANCPSLENMDLDELSLFGPLPGPGPALVDRNRLSSESSCKSWLSSMTMDSEDGYQTCVSEDSSRGAFSRQTSTDDECFIPKEGDDFLRRSSSRRNRSISNTSSGSMSPLWEGNLSSMFGTLPRKSRKGSVRKQLLKFIPGLHRAVEEEESRF

SEQ ID NO: 310 - DNA, 1794 bp, Homo Sapiens
gcacgaggcgagctggagtgatctttattcacaatgtctttacaaaggctcctgcaacacagcagcaatggcaatttggcggacttctgcgctgggccagcgtatagctcttactccacactcaccggcagccttacgatgaacgataatagaaggattcaaatgctagcagacacggtggctactctgcctcggggacgaaagcagcttgctttgaccagatcaagttctttaagtgacttttcctggtctcaaagaaagcttgttactgtggagaagcaggataatgaaacatttggatttgaaattcagtcttacaggccccagaatcagaatgcctgctcctcggaaatgttcactttgatatgcaaaatacaggaggacagcccagctcactgtgctggcctgcaagctggtgatgtccttgcaaatatcaatggtgtgagcacagaaggttttacctacaaacaagtcgttgacctgatcagatcgtccggaaacctgctaacgatagagactcttaatggaacaatgattctgaaaagaacggagcttgaagcaaagctgcaggttttaaagcaaactttgaaacaaaaatgggtggagtacagatctctgcagttacaggaacatcgtctgcttcatggtgatgcagctaattgccccagtttggaaaacatggacttggatgaattgtctttgtttggacccctgcctgggccaggcccagcccttgtggaccggaatcgattatccagtgagagcagctgtaagagctggctgagctccatgacgatggacagtgaagatggctaccagacgtgtgtgtctgaggactccagcaggggtgccttcagtcggcagacgagtacagatgatgagtgctttatccccaaggagggggatgattttctgaggaggtcatcttcaaggaggaaccggagcatcagtaacaccagcagcggatccatgtctcccttgtgggagggcaacttatcaagcatgtttgggaccctgccccggaagagcagaaagggaagtgtccgaaagcaactcttgaaatttatccctggccttcatcgtgctgtggaagaggaagaaagtcgcttttgacggattgtggtgtcctttcaaattagcttatttcacaaatatctctagactcacccagatcccagcttggtgggaaagtgcagaagaattgcaaaactgacatcccatttcacagcaatagtgacctttatttaaattgttgtgttatagtttatgcttcttaaatcatttttcaacctaaacagccaatttctaagcagacaggaaaactaaataataagttaattaatataacaaagatgcaggttcctgctcattccagtaatgtctttgaaagcaaaactaatatttattttctagattatccctgtgaataattgagaactttttggagtcaagtatgaataaaggtgtggcagaatataataatctggactattttctataggataattgctgggttataaaatcttaggtttgcttatgcccagtagctcctgcggaggcttaataataggcaattttgaatttgttcaaacctgtaatggcttgtaaacaaagatgaccatcagctgtttctcacatctatagtgacaataaagcgggaagtataagatttaataggaggggttaaggttcatgagaaccatggaaagatgtggtctgagatgggtgctgcaaagatcataataaagtcatttttatagacagtctaaacaaaaaaaaaaaaaaaaaaaaaaa

SEQ ID NO: 311 - protein, 501 aa, Homo Sapiens
MEQQDQSMKEGRLTLVLALATLIAAFGSSFQYGYNVAAVNSPALLMQQFYNETYYGRTGEFMEDFPLTLLWSVTVSMFPFGGFIGSLLVGPLVNKFGRKGALLFNNIFSIVPAILMGCSRVATSFELIIISRLLVGICAGVSSNVVPMYLGELAPKNLRGALGVVPQLFITVGILVAQIFGLRNLLANVDGWPILLGLTGVPAALQLLLLPFFPESPRYLLIQKKDEAAAKKALQTLRGWDSVDREVAEIRQEDEAEKAAGFISVLKLFRMRSLRWQLLSIIVLMGGQQLSGVNAIYYYADQIYLSAGVPEEHVQYVTAGTGAVNVVMTFCAVFVVELLGRRLLLLLGFSICLIACCVLTAALALQDTVSWMPYISIVCVISYVIGHALGPSPIPALLITEIFLQSSRPSAFMVGGSVHWLSNFTVGLIFPFIQEGLGPYSFIVFAVICLLTTIYIFLIVPETKAKTFIEINQIFTKMNKVSEVYPEKEELKELPPVTSEQ

SEQ ID NO: 312 - DNA, 2218 bp, Homo Sapiens
cttctctctccattcagtgcacgcgttactttggctaaaaggaggtgagcggcactctgcccttccagagcaagcatggagcaacaggatcagagcatgaaggaagggaggctgacgcttgtgcttgccctggcaaccctgatagctgcctttgggtcatccttccagtatgggtacaacgtggctgctgtcaactccccagcactgctcatgcaacaattttacaatgagacttactatggtaggaccggtgaattcatggaagacttccccttgacgttgctgtggtctgtaaccgtgtccatgtttccatttggagggtttatcggatccctcctggtcggccccttggtgaataaatttggcagaaaaggggccttgctgttcaacaacatattttctatcgtgcctgcgatcttaatgggatgcagcagagtcgccacatcatttgagcttatcattatttccagacttttggtgggaatatgtgcaggtgtatcttccaacgtggtccccatgtacttaggggagctggcccctaaaaacctgcggggggctctcggggtggtgccccagctcttcatcactgttggcatccttgtggcccagatctttggtcttcggaatctccttgcaaacgtagatggctggccgatcctgctggggctgaccggggtccccgcggcgctgcagctccttctgctgcccttcttccccgagagccccaggtacctgctgattcagaagaaagacgaagcggccgccaagaaagccctacagacgctgcgcggctgggactctgtggacagggaggtggccgagatccggcaggaggatgaggcagagaaggccgcgggcttcatctccgtgctgaagctgttccggatgcgctcgctgcgctggcagctgctgtccatcatcgtcctcatgggcggccagcagctgtcgggcgtcaacgctatctactactacgcggaccagatctacctgagcgccggcgtgccggaggagcacgtgcagtacgtgacggccggcaccggggccgtgaacgtggtcatgaccttctgcgccgtgttcgtggtggagctcctgggtcggaggctgctgctgctgctgggcttctccatctgcctcatagcctgctgcgtgctcactgcagctctggcactgcaggacacagtgtcctggatgccatacatcagcatcgtctgtgtcatctcctacgtcataggacatgccctcgggcccagtcccatacccgcgctgctcatcactgagatcttcctgcagtcctctcggccatctgccttcatggtggggggcagtgtgcactggctctccaacttcaccgtgggcttgatcttcccgttcatccaggagggcctcggcccgtacagcttcattgtcttcgccgtgatctgcctcctcaccaccatctacatcttcttgattgtcccggagaccaaggccaagacgttcatagagatcaaccagattttcaccaagatgaataaggtgtctgaagtgtacccggaaaaggaggaactgaaagagcttccacctgtcacttcggaacagtgactctggagaggaagccagtggagctggtctgccaggggcttcccactttggcttatttttctgacttctagctgtctgtgaatatccagaaataaaacaactctgatgtggaatgcagtcctcatctccagcctccccaccccagtgggaactgtgcaaagggctgccttgctgttcttgaagctgggctgtctctctccatgttggcctgtcaccagacccgagtcaattaaacagctggtcctccactttgctggttcagccttcgtgtggctcctggtaacgtggctccaccttgatgggtcaacctttgtgtggctcctggtaacataacaacaacagttactatagtggtgagatggaaggaatcaaattttgccagagaaactaactcggtggccccaacaggtcttccggggccatgggcatttgtttagagccaaattcatcctcttaccagatccttttccagaaatacctgtctaggaaggtgtgatgtcagaaacaatgacatccagaaagctgaggaacaggttcctgtggagacactgagtcagaattcttcatccaaattattttgttagtggaaaatggaattgcttctgtgtagtcaataaaatgaacctgatcacttttc

SEQ ID NO: 313 - protein, 437 aa, Homo Sapiens
MASVAVDPQPSVVTRVVNLPLVSSTYDLMSSAYLSTKDQYPYLKSVCEMAENGVKTITSVAMTSALPIIQKLEPQIAVANTYACKGLDRIEERLPILNQPSTQIVANAKGAVTGAKDAVTTTVTGAKDSVASTITGVMDKTKGAVTGSVEKTKSVVSGSINTVLGSRMMQLVSSGVENALTKSELLVEQYLPLTEEELEKEAKKVEGFDLVQKPSYYVRLGSLSTKLHSRAYQQALSRVKEAKQKSQQTISQLHSTVHLIEFARKNVYSANQKIQDAQDKLYLSWVEWKRSIGYDDTDESHCAEQFESRTLAIARNLTQQLQTTCHTLLSNIQGVPQNIQDQAKHMGVMAGDIYSVFRNAASFKEVSDSLLTSSKGQLQKMKESLDDVMDYLVNNTPLNWLVGPFYPQLTESQNAQDQGAEMDKSSQETQRSEHKTH

SEQ ID NO: 314 - DNA, 1314 bp, Homo Sapiens
atggcatccgttgcagttgatccacaaccgagtgtggtgactcgggtggtcaacctgcccttggtgagctccacgtatgacctcatgtcctcagcctatctcagtacaaaggaccagtatccctacctgaagtctgtgtgtgagatggcagagaacggtgtgaagaccatcacctccgtggccatgaccagtgctctgcccatcatccagaagctagagccgcaaattgcagttgccaatacctatgcctgtaaggggctagacaggattgaggagagactgcctattctgaatcagccatcaactcagattgttgccaatgccaaaggcgctgtgactggggcaaaagatgctgtgacgactactgtgactggggccaaggattctgtggccagcacgatcacaggggtgatggacaagaccaaaggggcagtgactggcagtgtggagaagaccaagtctgtggtcagtggcagcattaacacagtcttggggagtcggatgatgcagctcgtgagcagtggcgtagaaaatgcactcaccaaatcagagctgttggtagaacagtacctccctctcactgaggaagaactagaaaaagaagcaaaaaaagttgaaggatttgatctggttcagaagccaagttattatgttagactgggatccctgtctaccaagcttcactcccgtgcctaccagcaggctctcagcagggttaaagaagctaagcaaaaaagccaacagaccatttctcagctccattctactgttcacctgattgaatttgccaggaagaatgtgtatagtgccaatcagaaaattcaggatgctcaggataagctctacctctcatgggtagagtggaaaaggagcattggatatgatgatactgatgagtcccactgtgctgagcaatttgagtcacgtactcttgcaattgcccgcaacctgactcagcagctccagaccacgtgccacaccctcctgtccaacatccaaggtgtaccacagaacatccaagatcaagccaagcacatgggggtgatggcaggcgacatctactcagtgttccgcaatgctgcctcctttaaagaagtgtctgacagcctcctcacttctagcaaggggcagctgcagaaaatgaaggaatctttagatgacgtgatggattatcttgttaacaacacgcccctcaactggctggtaggtcccttttatcctcagctgactgagtctcagaatgctcaggaccaaggtgcagagatggacaagagcagccaggagacccagcgatctgagcataaaactcattaa

SEQ ID NO: 315 - protein, 433 aa, Homo Sapiens [sequence omitted]

SEQ ID NO: 316 - DNA, 2555 bp, Homo Sapiens
ggcgccgcatgtgtctccgcggcggctgcagccctcgagcgcccgccgccgcgccccaaccccggccgccgcccgccctcccgccccggcctcgcgcccccgtcccggcctcgcgccccggccgccctttgttgacgccggccaggccgtgcggtcggatgcgccgcggcagccccgggccccggctcggaggctcccggggcgagaggaggcggcccgccggccgggaccccgcgcgagtcggccccggccaggggctgcgtaggcccgcccggccaggcccagccgcctggacagagacagggcagggcattgttcatgcactgaccgacctcagcatccccggcatgacctcagggaacggaaactctgcctccagcatcgccggcactgccccccagaatggtgagaataaaccaccacaggccattgtgaaaccccaaatcctgacgcatgttatcgaagggtttgtgatccaggagggggcggacgtttcccggtgggacgctcgtctgctggtggggaatctcaagaagaagtatgcacaggggttcctgcctgagaaacttccacagcaggatcacaccaccaccactgactcggagatggaggagccctatctgcaagaatccaaagaggagggtgctcccctcaaactcaagtgtgagctctgtggccgggtggactttgcctataagttcaagcgttccaagcgcttctgttccatggcttgtgcaaagaggtacaacgtgggatgcaccaaacgggtgggacttttccactcagaccggagcaagctgcagaaggcaggagctgcgacccacaaccgccgtcggccagcaaagccagtctgccaccacttaccaaggataccaagaagcagccaacaggcactgtgcccctttcggttactgctgctttgcgtaacacacagccaggaagactccagccgttgctcagataactcaagctatgaggaacccttgtcacccatctcagccagctcatctacttccgccggcgacaaggccagcgggacctggagctccccgacatgcatatgcgggacctggtgggcatgggacaccacttcctgccaagtgagccaccaagtgaatgtagaagacgtctacgaattcatccgctctctgccaggctgccaggagatagcagaggaattccgtgcccaggaaatcgacgggcaagccctgctgctgctcaaggaggaccacctgatgagcgttatgaacatcaagctggggcccgccctgaagatctacgcccgcatcagcatgctcaaggactcctagggctggtggcaccaggattctggcccagggcgcctcctcccgactgagcagagccagacagacattcctgaggggcccagaaatggcggcgttggagggcaggggctctccctaggggcatagctggtgaggaggtctgggcacctcctccatggctctcaggggcctttcatttctgtgggaggggcagagaggtaggtggcacagaagatggggctttatgcttgtaaatattgatagcactggcttcctccaaagtcccaatactctagccccgctctcttcccctctttctgtcccccattttccagggggtatatggtcagggctccccaacctgagttggttacttcaagggcagccagcaggcctggatggaggcctagaaagcccttgccttccttcctcccacttctttctccaggcctggttaactcttccgttgtcagcttctcccccttcagcctgtttctgcagcagccagggttctcccccctacaccctctgcaggtggagagagagaagctgggcccagccgcggtgcctgctggccaagacgccttaacgctgtgtgtatgactgtgtgactgtgtgggagcctggactgacagataggccaagggctactctctggcatctccaggtgttttgtagcaaacagccacttagtgctttgtcctggactccactcagcctcaggatggggaatagccaagaatggcagcctcagcgcagaggcaaggtcagaaagagacggcgcttcagagtttcctttccagacacccctccccgcactgtgaagttcccctgaccgccctcctggttcacaaagagcattaagaaagctgcggtggtctgagcaacatagcccagacgtggagcctcctggcctgcctgcccgcccaccctgggagtccagtggtgaggctcagagaacttctaaggggaaagaacagctggagtttctgttgatgtgaagaaggcagctcttggcctcccactcccacacttctttgcctataaatcttcctagcagcaatttgagctacctgaggaggaggcagggcagaagggcaagggcctgcctctgacctgccgtgtcctttgcaggaaggaggtaggcacctttctgagcttattctattccccacccacacccccaggcagggttggaaatgaaggacttttttaacctttgttttgttttttaaaaataaatctgtaaaatctgaaaaaaaaaaaaaa

SEQ ID NO: 317 - protein, 171 aa, Homo Sapiens
MHPFYTRAATMIGEIAAAVSFISKFLRTKGLTSERQLQTFSQSLQELLAEHYKHHWFPEKPCKGSGYRCIRINHKMDPLIGQAAQRIGLSSQELFRLLPSELTLWVDPYEVSYRIGEDGSICVLYEASPAGGSTQNSTNVQMVDSRISCKEELLLGRTSPSKNYNMMTVSG

SEQ ID NO: 318 - DNA, 1783 bp, Homo Sapiens
cctctcggagctggaaatgcagctattgagatcttcgaatgctgcggagctggaggcggaggcagctggggaggtccgagcgatgtgaccaggccgccatcgctcgtctcttcctctctcctgccgcctcctgtgtcgaaaataacttttttagtctaaagaaagaaagacaaaagtagtcgtccgcccctcacgccctctcttcctctcagccttccgcccggtgaggaagcccggggtggctgctccgccgtcggggccgcgccgccgagccccagcgccccgggccgcccccgcacgccgcccccatgcatcccttctacacccgggccgccaccatgataggcgagatcgccgccgccgtgtccttcatctccaagtttctccgcaccaaggggctgacgagcgagcgacagctgcagaccttcagccagagcctgcaggagctgctggcagaacattataaacatcactggttcccagaaaagccatgcaagggatcgggttaccgttgtattcgcatcaaccataaaatggatcctctgattggacaggcagcacagcggattggactgagcagtcaggagctgttcaggcttctcccaagtgaactcacactctgggttgacccctatgaagtgtcctacagaattggagaggatggctccatctgtgtgctgtatgaagcctcaccagcaggaggtagcactcaaaacagcaccaacgtgcaaatggtagacagccgaatcagctgtaaggaggaacttctcttgggcagaacgagcccttccaaaaactacaatatgatgactgtatcaggttaagatatagtctgtggatggatcatctgatgatgatccataaatttgatttttgctttgggtgggctcctcttggggatggattatggaatttaaaccatgtcacagctgtgaagatctggcacaagatagaatggtaaaaaaaaaaaaaaattttaagtgacagtgccatagtttggacagtacctttcaatgattaattttaatagcctgtgagtccaagtaaatgatcactttatttgctagggagggaagtcctagggtggtttcagtttctcccagacatacctaaatttttacatcaatccttttaaagaaaatctgtatttcaaagaatctttctctgcagtaaatctcgcaggggaatttgcactattacacttgaaagttgttattgttaaccttttcggcagcttttaataggaaagttaaacgttttaaacatggtagtactggaaattttacaagacttttacctagcacttaaatatgtataaatgtacataaagacaaactagtaagcatgacctggggaaatggtcagaccttgtattgtgtttttggccttgaaagtagcaagtgaccagaatctgccatggcaacaggctttaaaaaagacccttaaaaagacactgtctcaactgtggtgttagcaccagccagctctctgtacatttgctagcttgtagttttctaagactgagtaaacttcttatttttagaaagtggaggtctggtttgtaactttccttgtacttaattgggtaaaagtcttttccacaaaccaccatctattttgtgaactttgttagtcatcttttatttggtaaattatgaactggtgtaaatttgtacagttcatgtatattgattgtggcaaagttgtacagatttctatattttggatgagaaatttttcttctctctataataaatcgtttcttatcttggcatttttaacc

SEQ ID NO: 319 - protein, 595 aa, Homo Sapiens
MATKARVMYDFAAEPGNNELTVNEGEIITITNPDVGGGWLEGRNIKGERGLVPTDYVEILPSDGKDQFSCGNSVADQAFLDSLSASTAQASSSAASNNHQVGSGNDPWSAWSASKSGNWESSEGWGAQPEGAGAQRNTNTPNNWDTAFGHPQAYQGPATGDDDDWDEDWDGPKSSSYFKDSESADAGGAQRGNSRASSSSMKIPLNKFPGFAKPGTEQYLLAKQLAKPKEKIPIIVGDYGPMWVYPTSTFDCVVADPRKGSKMYGLKSYIEYQLTPTNTNRSVNHRYKHFDWLYERLLVKFGSAIPIPSLPDKQVTGRFEEEFIKMRMERLQAWMTRMCRHPVISESEVFQQFLNFRDEKEWKTGKRKAERDELAGVMIFSTMEPEAPDLDLVEIEQKCEAVGKFTKAMDDGVKELLTVGQEHWKRCTGPLPKEYQKIGKALQSLATVFSSSGYQGETDLNDAITEAGKTYEEIASLVAEQPKKDLHFLMECNHEYKGFLGCFPDIIGTHKGAIEKVKESDKLVATSKITLQDKQNMVKRVSIMSYALQAEMNHFHSNRIYDYNSVIRLYLEQQVQFYETIAEKLRQALSRFPVM

SEQ ID NO: 320 - DNA, 2310 bp, Homo Sapiens
cgggagacgagccggccgtcccgggccgggggacccgcccgccatggccaccaaggctcgggttatgtatgattttgctgctgaacctggaaataatgaactgacggttaatgaaggagaaatcatcacaatcacaaatccggatgtaggtggaggatggctggaaggaagaaacatcaaaggagaacgagggctggttcccacagactacgttgaaattttacccagtgatggaaaagatcaattttcttgtggaaattcagtggctgaccaagccttccttgattctctctcagccagcacagctcaggccagttcgtcggctgccagcaacaatcaccaggttggcagtggcaatgacccctggtcagcctggagtgcctccaaatctgggaactgggaaagctcagaaggctggggggcccagccagagggggctggagcccaaagaaacacaaacactcccaacaactgggacactgccttcggccacccccaggcctaccaaggaccagcaactggtgatgatgatgactgggatgaagactgggatgggcccaaatcctcttcctactttaaggattcagagtcagctgatgcaggcggcgctcagcgaggaaacagtcgtgctagttcctcatccatgaaaattccccttaacaaatttcctggatttgcgaaacctggcacggaacagtatttgttggccaaacaactagcaaaacccaaagagaaaattcccatcattgttggagattatggcccaatgtgggtttatcctacctctacttttgactgtgtggtagcagatcccagaaaaggctccaaaatgtatggtctaaagagctacatcgaatatcagctaacacctactaacactaatcgatctgtaaaccacaggtataagcactttgactggttatatgagcgtctcctggttaagtttgggtcagccattccaatcccttctcttccagacaaacaagtcacaggccgctttgaagaggaatttatcaaaatgcgcatggagagacttcaggcctggatgaccaggatgtgtcgccatccagtaatctcagaaagtgaagttttccagcagttcctaaatttccgagatgagaaggaatggaaaactggaaagaggaaggccgagagagatgagctggcgggagtcatgatattttccaccatggaaccagaggcacctgacttggacttagtagaaatagagcagaagtgcgaggctgtggggaagttcaccaaggccatggatgacggcgtgaaggagctgctgacggtggggcaggagcactggaagcgctgcacgggcccattacccaaggaatatcagaagataggaaaggccttgcagagtttggccacagtgttcagttccagtggctatcaaggtgaaacagatctcaatgatgcaataacagaagcaggaaagacttatgaagaaattgccagtctcgtggcagaacagccaaagaaagatctccatttcctgatggaatgtaatcacgagtataaaggttttcttggctgcttccctgacatcattggcactcacaagggagcaatagaaaaagtgaaagaaagtgacaaactagttgcaacaagtaaaatcaccctacaagacaaacagaacatggtgaagagagtcagcatcatgtcttacgcgttgcaagctgagatgaatcactttcacagtaaccggatctatgattacaacagtgtcatccgcctgtacctggagcagcaagtgcaattttacgaaacgattgcagaaaagctgaggcaggccctcagccgctttccagtgatgtaggacagaacgggccttgaagagaatgccgcgtgctttctcctgacttggggcaatgcaattcaaaactttttttcccctattattcagaaaaaaaaggaaacaaaaccaaaaagaaagagttgcaaaaaactgcatttattttattagccaccctaaatgcgtcagttatttagggatggtcttttgttcatttccgcatccattatttaaaccagtggaaattgtctctatttttggaaagtacttaaaagttaccagaattttcaatggaaaatgaggggtttctccccactgatattttacatagagtcataatttatatgtcttataaattataagtcttatataatttataagtctcccacaatcttccagttcttacccagtgtcagataattaattactaattactttcttaaaaacatgaactatgccagaataaaaaatatctatgtttgtataaaaaaaaaaaaaaaaaa

SEQ ID NO: 321 - protein, 344 aa, Homo Sapiens
MKDLGAEHLAGHEGVQLLGLLNVYLEQEERFQPREKGLSLIEATPENDNTLCPGLRNAKVEDLRSLANFFGSCTETFVLAVNILDRFLALMKVKPKHLSCIGVCSFLLAARIVEEDCNIPSTHDVIRISQCKCTASDIKRMEKIISEKLHYELEATTALNFLHLYHTIILCHTSERKEILSLDKLEAQLKACNCRLIFSKAKPSVLALCLLNLEVETLKSVELLEILLLVKKHSKINDTEFFYWRELVSKCLAEYSSPECCKPDLKKLVWIVSRRTAQNLHNSYYSVPELPTIPEGGCFDESESEDSCEDMSCGEESLSSSPPSDQECTFFFNFKVAQTLCFPS

SEQ ID NO: 322 - DNA, 2044 bp, Homo Sapiens
ccggtcggatgccggaccgggggcaccgctgaggcggtgggtccccgacctgcgagacaggtttggaagcccccgctgcgcccagtccgtgcggaccgcgaggccgcgggcgggtggaggcgcgtctccggcacgatgaaggatttgggggcagagcacttggcaggtcatgaaggggtccaacttctcgggttgttgaacgtctacctggaacaagaagagagattccaacctcgagaaaaagggctgagtttgattgaggctaccccggagaatgataacactttgtgtccaggattgagaaatgccaaagttgaagatttaaggagtttagccaacttttttggatcttgcactgaaacttttgtcctggctgtcaatattttggacaggttcttggctcttatgaaggtgaaacctaaacatttgtcttgcattggagtctgttcttttttgctggctgctagaatagttgaagaagactgcaatattccatccactcatgatgtgatccggattagtcagtgtaaatgtactgcttctgacataaaacggatggaaaaaataatttcagaaaaattgcactatgaattggaagctactactgccttaaactttttgcacttataccatactattatactttgtcatacttcagaaaggaaagaaatactgagccttgataaactagaagctcagctgaaagcttgcaactgccgactcatcttttcaaaagcaaaaccatctgtattagccttgtgccttctcaatttggaagtggaaactttgaaatctgttgaattactggaaattctcttgctagttaaaaaacattccaagattaatgacactgagttcttctactggagagagttggtttctaaatgcctagccgagtattcttctcctgaatgttgcaaaccagatcttaagaagttggtttggatcgtttcaaggcgcacagcccagaacctccacaacagctactatagtgttcctgagctgccaacgatacctgaggggggttgttttgatgaaagtgaaagtgaggactcttgtgaagatatgagttgtggagaggagagtctcagcagctctcctcccagtgatcaagagtgcaccttctttttcaacttcaaagtggcacaaacactgtgctttccatcttagaaatctgattgttctgtcagaatttatatttacagggtttcaaagcaataaatgggggaataggtagtttcctggtttagcccccatctagtcaggaattaatatactggaatacctaccttctatttgttattcagatcagatctggcctattttcatatttatcctaagccatcaaatggggtagtgcctcttaaaccattaacagtactttagacattggcactttatttttctcgtagatctttagctactttggggaggagggaaggtgctgataccttcaatttgttacttttcaagatttttaaaaataactagtgtagcttatcttaaacattttataaaaccttcagatgtctttaagcagattggaagtatgcaagtgcttccttagcagggacagtggataatccttaatggtttatcatagatttcaccctccccccttctcagaagagtgagtatgctcttaaatgtcaaacacatttttgttgttttgttttttaaatgatcagtgtctatttgatgtgatgcagatcttataaatttgggaattataatattgacatttctgtgatttttatatatgtaatgtcttaattgagatttgtgttaaggcagaaataattaggctagggctcttagttttcattcctattgccccaagtattgtcaaactatggtattattttaatgttactttaaaaatccataatctgctagttttgcatgtacttatatgaaaacagtgcagtaagttgaaaactcagtatctatggaattgataaatgttgatctggtgtagtatattttatccgcattttcttatattaaaaaatgttctgcatgattacattttatttgcctttgt

SEQ ID NO: 323 - protein, 116 aa, Homo Sapiens
MPPHPLNKHTHTHTHTHTHTHTHKMLLGTAAPSCSLRMAVQAQRRAVGKTGSWSTLSPHTSQALHCLAGILHGICHACSQGEKSSCHSAKSKNPGKVYKMTLDPVKKQVSPELAMQ

SEQ ID NO: 324 - DNA, 3309 bp, Homo Sapiens
aggcagtgtgtggcccagggaaagctgcgtttcatggaggcttccaggaggctgccctgtaaagccaggcaggtggcttcaagtgccattcctgcaagtgcccctgcttcagctctcaggcccatccaatgcctcgagcccacgggggtgtcccggcaggtctgcgtcatcacgacccagtaacgctgctggctgtgtcctcatgccctcttcctctggctggccagtcatctttgtcacttctacacctttgagtgtgtacaggctgaatgttgagtgatgcccccccaccctctcaataaacacacacacacacacacacacacacacacacacaaaatgttattaggcacagcagctccatcctgctccctgagaatggcagtgcaggcacagagaagagcagttgggaagacaggcagctggtctaccctgtccccgcacacttcacaggcactccactgcttggcaggaattctgcatggcatctgccacgcatgctcacagggtgaaaaatcaagctgtcactctgcaaaatctaaaaaccctggaaaggtctataagatgacattagacccagttaagaagcaagtgtcacctgagttggccatgcaatgaatgaatattataagcagtattggagaactaggcggttgcttactaagaagtgtcttggaaacattcgagttcatacagtgcatgacaaagtaatagaaggctgcaagcactgaaaatgcacccgaatctggtacctaggatgagtacatgaatagtgatgaatagccctttgtgctgtgtgctatatacaaccatttgcattcagaaagcagcatttgaggctgagttccattactggtgattgaagtattttcaggagcagatacatgtggtgcatgttatatgcacttagtttgaaagtatccctcacccaaaaagtgcagaacctctgaaaggtgagccgtggtgcaggtgcccccctcgctgttcgggtcagttcttggccatgcttggcctgtcacacgccgggtctcaacaacatcgtgcgaggagacagtgactggtttcagcccaagagtcaactgttgagcatgacatcaggaagcctgtactgtcctgatcccaccaggcttgggttaatttcctattgcttcagagaaagagaggcgctcttgtgcttttgagagagctctcatgttaaaaagaggttgtctttgcactgcgcttggtatgatttgttttcttataaaacaggaagagaacctagaatgtgcctttcgtgaaggtctgacaaatggggtctcagagtcctaggacccgcaccaaggtcagagtccacctgtagaggctgagcatttctacatgcacccagggtgctgggctgaggctaagggtggacgcgtagaccccatcacaggcttccttcctgagcccaagtcccccatttggtcactatcccttctcagagcaagtggattctcttttcctcacttggaatattcaatgttgaagtagtggcctggagtggcctttccctcagctgcctgtctgggctccctggcttcccggatcttcatctcatacgtgaggcaataggaggagtttctattcattgagacaaacagtgagcgggcaccaacaggccagcagcttggcccttttcacagaggtggccttggagtctggagtctgggcagctgtctgcctctctacggctctgcttcccagcgggcacacgggtccggagcctcagaatgaagtggtgcagaggcgcagggcacacctaggagaagctcaatgaccaccaaagcccttgaggagagacggggtttgctgtgttagagaaatggcaacccccaggaccatgcacggctctggcagtgcacagtggctgattttcaccagttcctcctacccctgcctctgtcggagactagaaaacattctaccccttcaggtcttcttttaaaagaaaagagctatggcaaagcgtgccatacaaagttaaaaaaaggaagagtggctttgcgttcttgaccatggccacaattctggtcacttctagcatctgaccttgagaacggtgtagaggctctgagccaccgctggcctttgagagagtctcactctccagctagctctttgtgtagtgtccagggccccggcagtcaggatagagcgagcaaaagaagatggacagtggacagggcgcagtggctcacgcctgtaatcccagcgctttgggagagcgaggcgggcagatcacaaggtcaagagatcaagaccattctggccaacatggtgaaaccctgtttctactaaaaatacaaaaattagctgggcatggtggtgcgtgcctgtaatcccagctactcgggaggctgaggcaggagaatcgcttgaacccgggaggcagaggttgcagtgagccgagatcgtgccactgcactccagcctgggtgacagagcaagactccgtctcaaaaaagatggccatgctggccaaggctgggctcataggaaatatctgtagtaggatgaaaggaatctggcctagggagccccggactcggtttacctaccccgtactcatcccactcatctgtctaccctagtgtccatcatgccctggatgaatcataggtgggagggacagaagccgagaacaccaggcacacggggtggggggaatggggggagcccaggtgatcccctttggaaagtggattgatcctctcccctgtggaatgacagcttaacctgattaacccactggggcttgctattttatgagcatttttaaacagaaaggaaagatgatatcccagtgcaggtagactttatttttgaaagcatcgtggcccctcgcctctccctctcccccagaaccttggccagaattgagtcttcgcgttggggaggccacgctggaaccattgctctagggctgaaggtggaagtagggccactgccgcagcttcagccagagccctcgctgcttcgcagaatttaacaagcacacgactgggattcctttggatatgagaaaggaaggcaagtgcgggcaaagggaagctcctcccgtttttcataaacagaagtaagatgtcctctttcccaggtttgcacaatcacttctggcaaattaattgaaggtccttgaattcagccagtgcacgaaacctttgcatgttcttctgaaactgtacttcttccctattctgtctacccacactctgcgaactttgccttttccttaaacacattccagaccaaacactgttcagtttgttaaaaaaaaaaaaaaaaaaa

SEQ ID NO: 325 - protein, 543 aa, Homo Sapiens; identical to SEQ ID NO: 137

SEQ ID NO: 326 - DNA, 5128 bp, Homo Sapiens; identical to SEQ ID NO: 138

SEQ ID NO: 327 - protein, 338 aa, Homo Sapiens
MTTTLVSATIFDLSEVLCKGNKMLNYSAPSAGGCLLDRKAVGTPAGGGFPRRHSVTLPSSKFHQNQLLSSLKGEPAPALSSRDSRFRDRSFSEGGERLLPTQKQPGGGQVNSSRYKTELCRPFEENGACKYGDKCQFAHGIHELRSLTRHPKYKTELCRTFHTIGFCPYGPRCHFIHNAEERRALAGARDLSADRPRLQHSFSFAGFPSAAATAAATGLLDSPTSITPPPILSADDLLGSPTLPDGTNNPFAFSSQELASLFAPSMGLPGGGSPTTFLFRPMSESPHMFDSPPSPQDSLSDQEGYLSSSSSSHSGSDSPTLDNSRRLPIFSRLSISDD

SEQ ID NO: 328 - DNA, 3022 bp, Homo Sapiens
cggagtcagaaaggcgaggggcgccgggaactggcgtgtgggactccagacaggagaggctgcgccttccccgcaccgggaccttcgcgacacaccagatcctcgcccctggctcgcgcgaacgcacaggatgaccaccaccctcgtgtctgccaccatcttcgacttgagcgaagttttatgcaagggtaacaagatgctcaactatagtgctcccagtgcagggggttgcctgctggacagaaaggcagtgggcacccctgctggtgggggcttccctcggaggcactcagtcaccctgcccagctccaagttccaccagaaccagctcctcagcagcctcaagggtgagccagcccccgctctgagctcgcgagacagccgcttccgagaccgctccttctcggaagggggcgagcggctgctgcccacccagaagcagcccgggggcggccaggtcaactccagccgctacaagacggagctgtgccgcccctttgaggaaaacggtgcctgtaagtacggggacaagtgccagttcgcacacggcatccacgagctccgcagcctgacccgccaccccaagtacaagacggagctgtgccgcaccttccacaccatcggcttttgcccctacgggccccgctgccacttcatccacaacgctgaagagcgccgtgccctggccggggcccgggacctctccgctgaccgtccccgcctccagcatagctttagctttgctgggtttcccagtgccgctgccaccgccgctgccaccgggctgctggacagccccacgtccatcaccccaccccctattctgagcgccgatgacctcctgggctcacctaccctgcccgatggcaccaataacccttttgccttctccagccaggagctggcaagcctctttgcccctagcatggggctgcccgggggtggctccccgaccaccttcctcttccggcccatgtccgagtcccctcacatgtttgactctccccccagccctcaggattctctctcggaccaggagggctacctgagcagctccagcagcagccacagtggctcagactccccgaccttggacaactcaagacgcctgcccatcttcagcagactttccatctcagatgactaagccagggtagggagggacctcctgcctactccagcccctaccctgcacccacatcccataccctcttctccctacccatcccattccccacaggccctacattaacaaggttaagctcaacccctttcccccagcacctcagaatgtgccctccctctccccctcataaccccacctaacataaggacaagtcaatttgtcagtagcttcttctggcttgaaaccccctccctggattttatagcccacttaccatgcataacagacaagtcccatattttgtcagtagatgcctttttttttccggcttaagccttaagtgccaaatcacaagagaaaaagcagtaacagtttacagaagcaacttagtgccttgtaatctaactttgtcactgtgactacattacctcttcagcgccagagggcacccgtgggcctcccggagcctctgcccatggcggggtggagacccggaaccagcagccccctccactggcgacacaactgcaccttccctcatttcagtctcccgcacacttattcctcctcccctcttcccggtggcacctctccacctgtacccgcccccccaccccccccacccctgccccttggaagagttgttgccagaccagggttttgggggaaacctgtcttgacattcaaaacctttttcttcccgatctgaacccctgttgactaatcttgcctgggtttgtgtaggtctgcaggaaggaaggctgaaaaagcggacgaagattttgacttaagtgggactttgtgatttaattttttcttttttttaagtggggaggaaggggaagctagatggactaggagagacttgattttggtgctaaagttccccagttcatatgtgacatctttttaaaaaaaataacaacaaaaaaaaaatgagagaaaagctaaaaaaaaaaaagtaaggggtgagcagttaatggtattcattccacatacaatatctgtgtaaaacgatttcctgtagaagtagctttaatggtttttgctctagaataccgtaggtctatccttagagcactcacgccatgctttcttccctgggttttaaacttcatataactttcagaaattggagagcaaaaattttgcttgtcactgcacatcaatataaaaaagcttatttaacttatcaaaacgtatttattgccaaactatgcttttttttgttaattttgttcatatttatcgggatgacaaatccatagaatatattcttttatgttaaattatgatcttcatattaatcttaaaattttgtgacgtgtctttttcctttttttccacagttttaatatattattcttcaacgacattttttgtaactttacacttttttggttattttattttaaaaaaatgaaaaattaatttaaaaaaatgcaaaaaactgttggattatttattttagaaattcccccctttgtgttggactgcaaattgagtttctttctctttaggcctttcacaactaggactgagaatgtatgtaaaagttctgtgacagtacagaaggaaaacaactttttatgtatagcttctaaaaggggaaaaaaaaaaaaagagaaaccctttgacttccacgtgcccatctcaagacattccactcacagatttgaggttctggattccaggtctggagttttccaatgttaatgtaaacagaactggcacacacacattaagatgaatgtaattattattcctcttgctggtcactaccgtcgctttctatttctctttctttgtgtgaatttatttaaaagaaaaaaaaactttttgtaacgactatttgcagtttaaaaatcaataaaccccgttttttcaagaaacatt

SEQ ID NO: 329 - protein, 82 aa, Homo Sapiens
MATFPPATSAPQQPPGPEDEDSSLDESDLYSLAHSYLGGGGRKGRTKREAAANTNRPSPGGHERKLVTKLQNSERKKRGARR

SEQ ID NO: 330 - DNA, 719 bp, Homo Sapiens
cagccttataagctgagggagtggagaggcccggggccaggaaagcagagacagacaaagcgttaggagaagaagagaggcagggaagacaagccaggcacgatggccaccttcccaccagcaaccagcgccccccagcagcccccaggcccggaggacgaggactccagcctggatgaatctgacctctatagcctggcccattcctacctcggaggtggaggccggaaaggtcgcaccaagagagaagctgctgccaacaccaaccgccccagccctggcgggcacgagaggaaactggtgaccaagctgcagaattcagagaggaagaagcgaggggcacggcgctgagacagagctggagatgaggccagaccatggacactacacccagcaatagagacgggactgcggaggaaggaggacccaggacaggatccaggccggcttgccacaccccccacccctaggacttattcccgctgactgagtctctgaggggctaccaggaaagcgcctccaaccctagcaaaagtgcaagatggggagtgagaggctgggaatggaggggcagagccaggaagatcccccagaaaagaaagctacagaagaaactggggctcctccagggtggcagcaacaataaatagacacgcacggcagccacagcttgggtgtgtgttcatccttgttaaaaaaaaaaaaaaaaaaaaaaaaaa

SEQ ID NO: 331 - protein, 352 aa, Homo Sapiens
MEGISIYTSDNYTEEMGSGDYDSMKEPCFREENANFNKIFLPTIYSIIFLTGIVGNGLVILVMGYQKKLRSMTDKYRLHLSVADLLFVITLPFWAVDAVANWYFGNFLCKAVHVIYTVNLYSSVLILAFISLDRYLAIVHATNSQRPRKLLAEKVVYVGVWIPALLLTIPDFIFANVSEADDRYICDRFYPNDLWVVVFQFQHIMVGLILPGIVILSCYCIIISKLSHSKGHQKRKALKTTVILILAFFACWLPYYIGISIDSFILLEIIKQGCEFENTVHKWISITEALAFFHCCLNPILYAFLGAKFKTSAQHALTSVSRGSSLKILSKGKRGGHSSVSTESESSSFHSS

SEQ ID NO: 332 - DNA, 1679 bp, Homo Sapiens
gtttgttggctgcggcagcaggtagcaaagtgacgccgagggcctgagtgctccagtagccaccgcatctggagaaccagcggttaccatggaggggatcagtatatacacttcagataactacaccgaggaaatgggctcaggggactatgactccatgaaggaaccctgtttccgtgaagaaaatgctaatttcaataaaatcttcctgcccaccatctactccatcatcttcttaactggcattgtgggcaatggattggtcatcctggtcatgggttaccagaagaaactgagaagcatgacggacaagtacaggctgcacctgtcagtggccgacctcctctttgtcatcacgcttcccttctgggcagttgatgccgtggcaaactggtactttgggaacttcctatgcaaggcagtccatgtcatctacacagtcaacctctacagcagtgtcctcatcctggccttcatcagtctggaccgctacctggccatcgtccacgccaccaacagtcagaggccaaggaagctgttggctgaaaaggtggtctatgttggcgtctggatccctgccctcctgctgactattcccgacttcatctttgccaacgtcagtgaggcagatgacagatatatctgtgaccgcttctaccccaatgacttgtgggtggttgtgttccagtttcagcacatcatggttggccttatcctgcctggtattgtcatcctgtcctgctattgcattatcatctccaagctgtcacactccaagggccaccagaagcgcaaggccctcaagaccacagtcatcctcatcctggctttcttcgcctgttggctgccttactacattgggatcagcatcgactccttcatcctcctggaaatcatcaagcaagggtgtgagtttgagaacactgtgcacaagtggatttccatcaccgaggccctagctttcttccactgttgtctgaaccccatcctctatgctttccttggagccaaatttaaaacctctgcccagcacgcactcacctctgtgagcagagggtccagcctcaagatcctctccaaaggaaagcgaggtggacattcatctgtttccactgagtctgagtcttcaagttttcactccagctaacacagatgtaaaagacttttttttatacgataaataacttttttttaagttacacatttttcagatataaaagactgaccaatattgtacagtttttattgcttgttggatttttgtcttgtgtttctttagtttttgtgaagtttaattgacttatttatataaattttttttgtttcatattgatgtgtgtctaggcaggacctgtggccaagttcttagttgctgtatgtctcgtggtaggactgtagaaaagggaactgaacattccagagcgtgtagtgaatcacgtaaagctagaaatgatccccagctgtttatgcatagataatctctccattcccgtggaacgtttttcctgttcttaagacgtgattttgctgtagaagatggcacttataaccaaagcccaaagtggtatagaaatgctggtttttcagttttcaggagtgggttgatttcagcacctacagtgtacagtcttgtattaagttgttaataaaagtacatgttaaacttacttagtgttatg

SEQ ID NO: 333 - protein, 136 aa, Homo Sapiens [sequence omitted]

SEQ ID NO: 334 - DNA, 1527 bp, Homo Sapiens
agcaattcatggctctgaaggagcgcattggctggagatacagcctcctcttcgtgggcctactacagttaaacattgtcgtcttcggagcactgctcagacccatcatcatcagaggaccagcgtcaccaaaaatagtcatccaggaaaatcggaaagaagcacagtatatgcttgaaaatgagaaaacacgaacctcaatagactccattgactcaggagtagaactaactacctcacctaaaaatgtgcctactcacactaacccagaactggagccgaaggcagacctgcagcaggtcctggtgaagaccagccccaggccaagcaaaaagaaagccccgctattagacttctccattttgaaagagaaaagttttatttgttatgcattatttggtctccttgcgacactgtgattctttgcaccttccttgtacatcattcctctgggcattagtctgggcattgaccaggacagcgctgcttttttattatctacaatggccattgcagaagttttcaggaggatcggagctggttttgtcctcaacagagagcccattcgtgtgatttacattgagctcatctgcgtcatcttattgactgtgtctctgtttgcctttacttttgctagggaattctggggtctaatgtcatgtagcgtattttttgggtttatggttggaacaacaggagggacccacattccactgcttgctgaggatgatgttgtgggcattgagaagatgtcttctgcagctggggtctacatcttcattcagagcatagcaggactggctggaccaccccttgcggtttgttggtggaccaaagtaagatctacagcagggccttctactcctgcgcagctggcatggccctggctgctgtgtgcctcgccctggtgagaccgtgtaagatgggactgtgccagcatcatcactcaggtgaaacaaaggtagtgagccatcgtgggaagactttacaggacatacctgaagactttctggaaatggatcttgcaaaaaatgagcacagagttcacgtgcaaatggagccggtatgacacactttcttacaacaacagccactgtgttggctggagagggatggggtgggcccaacggagacacaaggaggtagaggagctaacccctctactccactttcaaaactacattttaaagggaatgtgtatgtgaagagcactaccaacatcgcttttgttttaagttttcctttttgcttgtttttaaagccaaaacaaaaaacaaccaagcactcttccatatataaatctggctgtattcagtagcaatacaaaagatatgtagaaagactctttggttcacattccaatattaaaatagtgacacgaactggcaaagtggttttaaaagctttcacatgggataaatgattttctttctttcttttctttcttcgtatggtcttgtcagaataaactactatcttgaataaaacaacatccaacccaggtcattgaaatgaaattggccagtc

SEQ ID NO: 335 - protein, 327 aa, Homo Sapiens
MTVVSVPQREPLVLGGRLAPLGFSSRGYFGALPMVTTAPPPLPRIPDPRALPPTLFLPHFLGGDGPCLTPQPRAPAALPNRSLAVAGGTPRAAPKKRRKKKVRASPAGQLPSRFHQYQQHRPSLEGGRSPATGPSGAQEVPGPAAALAPSPAAAAGTEGASPDLAPLRPAAPGQTPLRKEVLKSKMGKSEKIALPHGQLVHGIHLYEQPKINRQKSKYNLPLTKITSAKRNENNFWQDSVSSDRIQKQEKKPFKNTENIKNSHLKKSAFLTEVSQKENYAGAKFSDPPSPSVLPKPPSHWMGSTVENSNQNRELMAVHLKTLLKVQT

SEQ ID NO: 336 - DNA, 2061 bp, Homo Sapiens
tgttccgcgatcttctcaggctctcctagcagcatccatcgccgccaccctatcttcactggcttcaccttctccttctctcttcgttgctgagcgacaagcttcctagcgctatgactgtcgtctccgtcccgcagcgggagccgctcgtcctgggtggccgccttgcgccgcttggcttttcctcccgaggttactttggggccctcccgatggtgaccacggctccgcctcctttaccccggatcccggacccccgggcactgcccccgaccctcttcctccctcatttcctagggggagatggcccgtgtctgaccccccagcctcgcgctccagcagctctgcccaaccgcagcctcgccgtggcgggaggcactcctcgggcagcgccgaagaagcggcgaaagaagaaggtgcgggccagccccgcagggcagctgcccagccgcttccaccagtaccagcagcaccggccgagtctggagggcggccggagccccgcgaccggcccgagcggagcgcaggaggtcccgggcccggccgccgccttggccccgagtcctgcagccgcagccggcacggagggagccagccccgaccttgccccgctgcggcccgcggctcccggccaaacccccctcaggaaagaggttttaaaatcaaagatgggaaaatcggagaaaattgcccttccccatggccagcttgttcatggtatacacttgtatgagcaaccaaagataaacagacagaaaagcaaatataacttgccactaaccaagatcacctctgcaaaaagaaatgaaaacaacttttggcaggattctgtttcatctgacagaattcagaagcaggaaaaaaagccttttaaaaataccgagaacattaaaaattcgcatttgaagaaatcagcatttctaactgaagtgagccaaaaggaaaattatgctggggcaaagtttagtgatccaccttctcctagtgttcttccaaagcctcctagtcactggatgggaagcactgttgaaaattccaaccaaaacagggagctgatggcagtacacttaaaaaccctcctcaaagttcaaacttagatttcagatttcagtatgtgtgtaaaacataatttttcccatatccctggactcttgagaaaattggtacagaaatggaaatttgccttgttgcaacatacaattgcaaaagatgagtttaaaaaattacatacaaacagcttgtattatattttatattttgtaaatactgtataccatgtattatgtgtatattgttcatacttgagaggtatattatagttttgttatgaaagtatgtattttgccctgcccacattgcaggtgttttgtatatatacaatggataaattttaagtgtgtgctaaggcacatggaagaccgattttatttgcacaaggtactgagatttttttcaagaaacagctgtcaaatctcaaggtgaagatctaaatgtgaacagtttactaatgcactactgaagtttaaatctgtggcacaatcaatgtaagcatggggtttgtttctctaaattgatttgtaatctgaaattactgaacaactcctattcccatttttgctaaactcaatttctggttttggtatatatccattccagcttaatgcctctaattttaatgccaacaaaattggttgtaatcaaattttaaaataataataatttggcccccccttttaaaatagtcttgactctttgtgtgtgactgtttctcatgtttgaatgtgtgactaggagatgattttgtgtggttggatttttttgacttctactttactggctgagtgtgagccgccatgcctggccataatctacattttcttaccaggagcagcattgaggtttttgagcatagtacttgactactctagaggctgagacgggagcatctcttgagcctgagaagtggagattgcaattgagctaggatcaggccactgcactccagcctgggtaacagacgctgtctcaaaaaaaaggccaagagaaagtaagggagacaga

SEQ ID NO: 337 - protein, 819 aa, Homo Sapiens
MAEVEDQAARDMKRLEEKDKERKNVKGIRDDIEEEDDQEAYFRYMAENPTAGVVQEEEEDNLEYDSDGNPIAPTKKIIDPLPPIDHSEIDYPPFEKNFYNEHEEITNLTPQQLIDLRHKLNLRVSGAAPPRPGSSFAHFGFDEQLMHQIRKSEYTQPTPIQCQGVPVALSGRDMIGIAKTGSGKTAAFIWPMLIHIMDQKELEPGDGPIAVIVCPTRELCQQIHAECKRFGKAYNLRSVAVYGGGSMWEQAKALQEGAEIVVCTPGRLIDHVKKKATNLQRVSYLVFDEADRMFDMGFEYQVRSIASHVRPDRQTLLFSATFRKKIEKLARDILIDPIRVVQGDIGEANEDVTQIVEILHSGPSKWNWLTRRLVEFTSSGSVLLFVTKKANAEELANNLKQEGHNLGLLHGDMDQSERNKVISDFKKKDIPVLVATDVAARGLDIPSIKTVINYDVARDIDTHTHRIGRTGRAGEKGVAYTLLTPKDSNFAGDLVRNLEGANQHVSKELLDLAMQNAWFRKSRFKGGKGKKLNIGGGGLGYRERPGLGSENMDRGNNNVMSNYEAYKPSTGAMGDRLTAMKAAFQSQYKSHFVAASLSNQKAGSSAAGASGWTSAGSLNSVPTNSAQQGHNSPDSPVTSAAKGIPGFGNTGNISGAPVTYPSAGAQGVNNTASGNNSREGTGGSNGKRERYTENRGSSRHSHGETGNRHSDSPRHGDGGRHGDGYRHPESSSRHTDGHRHGENRHGGSAGRHGENRGANDGRNGESRKEAFNRESKMEPKMEPKVDSSKMDKVDSKTDKTADGFAVPEPPKRKKSRWDS

SEQ ID NO: 338 - DNA, 1071 bp, Homo Sapiens
gtccatcttgctgctgtccactttgggttccatcttgggctccatcttgctctcacgattaaaagcttctttcctgctttccccattccgaccatcatttgcaccccggttctccccatgccggcctgcgcttcctccatgtctgttctccccgtgccgatggccatcagtatgacggctgctgctttctggatggcggtatccatctccatggcgaccaccatctccgtgacgtggactatcgctatgccgattgccagtctctccgtgactgtgacggctgctgccccggttctcagtatatctctctcttttcccgttgctgcccccagtcccttctcggctgttattccctgaagctgtgttgttgactccttgggctccggcagacgggtaggtcacaggggcaccactgatgttgccagtattgccaaagcctgggatgcccttggcggcactggtgacggggctgtcaggactgttatggccctgttgtgctgagttagttggaacagaattcaagctccctgcactagtccacctgccccactgcttcttcgcttctctcttggaaagtccagtctctcctcggcttgcaatggaccccaactgctcctgcgccgctggtgtctcctgcacctgcgctggttcctgcaagtgcaaagagtgcaaatgcacctcctgcaagaagagctgctgctcctgctgccccgtgggctgtagcaagtgtgcccagggctgtgtttgcaaaggggcgtcagagaagtgcagctgctgcgactgatgccaggacaacctttctcccagatgtaaacagagagacatgtacaaacctggattttttttttataccaccttgacccatttgctacattccttttcctgtgaaatatgtgagtgataattaaacactttagacctgaaaaaaaaaaaaaaaaaaaaaaaaaaaaaaaaaaaaaaaaaaaaaaaaaaaaaaaaaaaaaaaaaaaaaaaaaaaaaaaaaaaaaaaaaaaaaaaaaaaaaaaaaaaaaaaaaaaaaaaaaaaaaaaaaaaaaaaaaaaaaaaaaaaaa

SEQ ID NO: 339 - protein, 508 aa, Homo Sapiens
MTQTLKYASRVFHRVRWAPELGASLGYREYHSARRSLADIPGPSTPSFLAELFCKGGLSRLHELQVQGAAHFGPVWLASFGTVRTVYVAAPALVEELLRQEGPRPERCSFSPWTEHRRCRQRACGLLTAEGEEWQRLRSLLAPLLLRPQAAARYAGTLNNVVCDLVRRLRRQRGRGTGPPALVRDVAGEFYKFGLEGIAAVLLGSRLGCLEAQVPPDTETFIRAVGSVFVSTLLTMAMPHWLRHLVPGPWGRLCRDWDQMFAFAQRHVERREAEAAMRNGGQPEKDLESGAHLTHFLFREELPAQSILGNVTELLLAGVDTVSNTLSWALYELSRHPEVQTALHSEITAALSPGSSAYPSATVLSQLPLLKAVVKEVLRLYPVVPGNSRVPDKDIHVGDYIIPKNTLVTLCHYATSRDPAQFPEPNSFRPARWLGEGPTPHPFASLPFGFGKRSCMGRRLAELELQMALAQILTHFEVQPEPGAAPVRPKTRTVLVPERSINLQFLDR

SEQ ID NO: 340 - DNA, 2393 bp, Homo Sapiens
ggggttgagatatgatgctcaggagaagcgctttctttcgcgagcaccctgaaccagaccatgacccagaccctcaagtacgcctccagagtgttccatcgcgtccgctgggcgcccgagttgggcgcctccctaggctaccgagagtaccactcagcacgccggagcttggcagacatcccaggcccctctacgcccagctttctggccgaacttttctgcaagggggggctgtcgaggctacacgagctgcaggtgcagggcgccgcgcacttcgggccggtgtggctagccagctttgggacagtgcgcaccgtgtacgtggctgcccctgcactcgtcgaggagctgctgcgacaggagggaccccggcccgagcgctgcagcttctcgccctggacggagcaccgccgctgccgccagcgggcttgcggactgctcactgcggaaggcgaagaatggcaaaggctccgcagtctcctggccccgctcctcctccggcctcaagcggccgcccgctacgccggaaccctgaacaacgtagtctgcgaccttgtgcggcgtctgaggcgccagcggggacgtggcacggggccgcccgccctggttcgggacgtggcgggggaattttacaagttcggactggaaggcatcgccgcggttctgctcggctcgcgcttgggctgcctggaggctcaagtgccacccgacacggagaccttcatccgcgctgtgggctcggtgtttgtgtccacgctgttgaccatggcgatgccccactggctgcgccaccttgtgcctgggccctggggccgcctctgccgagactgggaccagatgtttgcatttgctcagaggcacgtggagcggcgagaggcagaggcagccatgaggaacggaggacagcccgagaaggacctggagtctggggcgcacctgacccacttcctgttccgggaagagttgcctgcccagtccatcctgggaaatgtgacagagttgctattggcgggagtggacacggtgtccaacacgctctcttgggctctgtatgagctctcccggcaccccgaagtccagacagcactccactcagagatcacagctgccctgagccctggctccagtgcctacccctcagccactgttctgtcccagctgcccctgctgaaggcggtggtcaaggaagtgctaagactgtaccctgtggtacctggaaattctcgtgtcccagacaaagacattcatgtgggtgactatattatccccaaaaatacgctggtcactctgtgtcactatgccacttcaagggaccctgcccagttcccagagccaaattcttttcgtccagctcgctggctgggggagggtcccaccccccacccatttgcatctcttccctttggctttggcaagcgcagctgtatggggagacgcctggcagagcttgaattgcaaatggctttggcccagatcctaacacattttgaggtgcagcctgagccaggtgcggccccagttagacccaagacccggactgtcctggtacctgaaaggagcatcaacctacagtttttggacagatagtcccatggaaagagactgtcatcatcaccctttcattcatcatagggataagattttttgtaggcacaagaccaaggtatacatcttcccctaatgcctatctgaccaaactggatagaaccaccatagtgaagtgtgaggcggccctgaccaatgtgtgaagtatgcacttggcctgactcaggaagccaggtgagaaaaccatggtctctctgcttgcttggcccttctgatcatgtatgcatcccccaaggatgaaatcagattttaactaataatgctggatggcctgaggaaagattcaactgcctctctttttgggctttcatagtgttcattgatgctgctggctaagcatttatcaaagcataagctcagtaactgtgcatctggtctgtacctggttggtccttcgtctttgcatgtaagctctttgagaggaagggtgaagccttatttgttttttatgtcccctgccagggcctgtctctgactaggtgtcaccatacacattcttagattgaatctgaaccatgtggcagaagggataagcagcttacttagtaggctctgtctacccccttccttctttgtcttgcccctaggaaggtgaatctgccctagcctggtttacggtttcttataactctcctttgctctctggccactattaagtgggtttgccccatcacttagttctcaggcagagacatctttgggcctgtccctgcccaggcctctggctttttatattgaaaatttttaaatattcacaaattttagaataaatcaaatattccattctt

SEQ ID NO: 341 - protein, 596 aa, Homo Sapiens
MRRAHEGREIPSLGGARRREVLQAGRSQRAAGRRRRRQELELGVGSGRPGGPPPGPGRRGTCAAALPPEWPRRRTGLPRRGPRPPLAMAKWLNKYFSLGNSKTKSPPQPPRPDYREQRRRGERPSQPPQAVPQASSAASASCGPATASCFSASSGSLPDDSGSTSDLIRAYRAQKERHFQDPYNGPGSSLRKLRAMCRLDYCGGSGEPGGVQRAFSASSASGAAGCCCASSGAGAAASSSSSSGSPHLYRSSSERRPATPAEVRYISPKHRLIKVESAAGGGAGDPLGGACAGGRTWSPTACGGKKLLNKCAASAAEESGAGKKDKVTIADDYSDPFDAKNDLKSKAGKGESAGYMEPYEAQRIMTEFQRQESVRSQHKGIQLYDTPYEPEGQSVDSDSESTVSPRLRESKLPQDDDRPADEYDQPWEWNRVTSPALAAQFNGNEKRQSSPSPSRDRRRQLRAPGGGFKPIKHGSPEFCGILGERVDPAVPLEKQIWYHGAISRGDAENLLRLCKECSYLVRNSQTSKHDYPLSLRSNQGFMHMKLAKTKEKYVLGQNSPPFDSVPEVIHYYTTRKLPIKGAEHLSLLYPVAVRTL

SEQ ID NO: 342 - DNA, 2306 bp, Homo Sapiens
cgggccgccgggacgggcacgggcgcgcgggctccggcgggcgccggctgccttcctccgtcgctcgctgtctctcccggccgcattctcctccgctgcggggccgagctctccccagcgctcgcaggaaggaagaagggagccgaggacgccgagaagttcccgcggcagccgcggatcccggccaaggcggaggctgcggctccgacggggcaggagcgcgatccacggcgaggggcgtacggccaaagggtccgcggcgtggagcgctcggaccttccgctctcccccgggcgtgggccgggaccccatgagacgcgcccacgaggggcgcgagattcctagcttgggcggcgctaggcggagggaggtgttgcaggccggccggagccagagagctgccggcaggaggcggcggcggcaagaacttgaacttggcgtcgggagcgggcgccccggaggccccccgccggggccggggcgccgagggacctgcgccgcagcgctgccccccgaatggccgcggcggcggaccgggctcccgcgccgcggccctaggccgcctctcgccatggccaagtggctaaacaagtacttcagcttgggcaacagcaagaccaagagccccccgcagccgccgcggccagactaccgcgagcagcggcgccgaggcgagcggccttcgcagcccccccaggccgtgccgcaggcctcctccgccgcctcggcgtcctgcggtccggccaccgcctcctgcttctcagcctcttcgggctcgctgcccgacgacagcggcagcaccagcgacctcatccgcgcctaccgcgcgcagaaggagcgacacttccaggacccctacaacgggcctggctcgtcgctgcgcaaactgcgcgccatgtgccgcctggactactgcggcggcagcggggagccaggcggggtccagcgcgccttctcggcctcgtccgcgtcgggcgccgcgggctgttgctgcgcctcctcgggcgcgggcgccgccgcgtcctcgtcctcgtcctccggctctccgcatctctaccgcagcagcagcgagcggcggcccgccacgccggccgaggtgcgctacatctcccccaagcaccgcctcatcaaagtggagagcgccgcgggcggtggggccggggaccccctggggggcgcctgcgcgggcggccgcacctggagcccgacggcctgcggaggcaagaaactgctcaacaagtgcgccgcctcagccgcggaggagagcggggccggcaagaaggacaaggtgaccatagccgatgactactcagatccctttgatgccaagaatgatctcaagagcaaagcaggaaagggggagagtgctggctacatggagccctatgaggcacagaggatcatgacagaatttcagaggcaggaaagtgtccggtcccagcataaaggtatccagttatatgacaccccttacgaacctgaaggccaaagtgttgactcggactcggagagcacagtcagcccccgactgcgggagagcaagctgccccaggatgacgacaggcccgccgatgagtacgaccagccttgggagtggaaccgggtcaccagcccagccctggcagcacagtttaatggcaacgagaagcggcagtcatccccctcaccttcgcgggaccggcggcgccagcttcgtgcccctggagggggctttaagcctatcaaacatgggagccctgagttctgcgggatcctaggagaaagggtggatcctgccgtccccctggagaagcaaatatggtatcacggagccatcagcagaggagacgccgagaacctgctgcgactctgcaaggagtgtagctaccttgtccggaacagccagaccagcaagcatgactaccccctctccctgaggagcaaccagggttttatgcacatgaaactggccaaaaccaaagagaaatacgttctgggtcagaacagccctccgttcgacagtgtcccggaagtcatccactactacaccaccagaaagctacccatcaaaggggctgagcacttgtccctcctctatcccgtggctgtgaggaccctgtgagcggaccagacctgccctgctctgtgacagagcctggagacttggaggtgccagaggccccccaccaaccagcccccagccactgttgctggctgtgtcgtttgtgttgtgtgtatggtactagcacaccactgcatgtctctagaatgctgttgccacttacgggggctggaggcctggataaagacagaagggcggcaacacc

SEQ ID NO: 343 - protein, 513 aa, Homo Sapiens
MASVLSRRLGKRSLLGARVLGPSASEGPSAAPPSEPLLEGAAPQPFTTSDDTPCQEQPKEVLKAPSTSGLQQVAFQPGQKVYVWYGGQECTGLVEQHSWMEGQVTVWLLEQKLQVCCRVEEVWLAELQGPCPQAPPLEPGAQALAYRPVSRNIDVPKRKSDAVEMDEMMAAMVLTSLSCSPVVQSPPGTEANFSASRAACDPWKESGDISDSGSSTTSGHWSGSSGVSTPSPPHPQASPKYLGDAFGSPQTDHGFETDPDPFLLDEPAPRKRKNSVKVMYKCLWPNCGKVLRSIVGIKRHVKALHLGDTVDSDQFKREEDFYYTEVQLKEESAAAAAAAAAGTPVPGTPTSEPAPTPSMTGLPLSALPPPLHKAQSSGPEHPGPESSLPSGALSKSAPGSFWHIQADHAYQALPSFQIPVSPHIYTSVSWAAAPSAACSLSPVRSRSLSFSEPQQPAPAMKSHLIVTSPPRAQSGARKARGEAKKCRKVYGIEHRDQWCTACRWKKACQRFLD

SEQ ID NO: 344 - DNA, 2100 bp, Homo Sapiens
aagtgcgcatgtgcgcgaggagtcgctcgggcacttattgagcgccgactgtctacgggcggccgggggtgatgggcagaggcttcagtgtccccttcgcctccgcaggagaggagaggcagcagcatggcgagtgtcctgtcccgacgccttggaaagcggtccctcctgggagcccgggtgttgggacccagtgcctcggaggggccctcggctgccccaccctcggagccactgctagaaggggccgctccccagcctttcaccacctctgatgacaccccctgccaggagcagcccaaggaagtccttaaggctcccagcacctcgggccttcagcaggtggcctttcagcctgggcagaaggtttatgtgtggtacgggggtcaagagtgcacaggactggtggagcagcacagctggatggagggtcaggtgaccgtctggctgctggagcagaagctgcaggtctgctgcagggtggaggaggtgtggctggcagagctgcagggcccctgtccccaggcaccacccctggagcccggagcccaggccctggcctacaggcccgtctccaggaacatcgatgtcccaaagaggaagtcggacgcagtggaaatggatgagatgatggcggccatggtgctgacgtccctgtcctgcagccctgttgtacagagtcctcccgggaccgaggccaacttctctgcttcccgtgcggcctgcgacccatggaaggagagtggtgacatctcggacagcggcagcagcactaccagcggtcactggagtgggagcagtggtgtctccaccccctcgcccccccacccccaggccagccccaagtatttgggggatgcttttggttctccccaaactgatcatggctttgagaccgatcctgaccctttcctgctggacgaaccagctccacgaaaaagaaagaactctgtgaaggtgatgtacaagtgcctgtggccaaactgtggcaaagttctgcgctccattgtgggcatcaaacgacacgtcaaagccctccatctgggggacacagtggactctgatcagttcaagcgggaggaggatttctactacacagaggtgcagctgaaggaggaatctgctgctgctgctgctgctgctgccgcaggcaccccagtccctgggactcccacctccgagccagctcccacccccagcatgactggcctgcctctgtctgctcttccaccacctctgcacaaagcccagtcctccggcccagaacatcctggcccggagtcctccctgccctcaggggctctcagcaagtcagctcctgggtccttctggcacattcaggcagatcatgcataccaggctctgccatccttccagatcccagtctcaccacacatctacaccagtgtcagctgggctgctgccccctccgccgcctgctctctctctccggtccggagccggtcgctaagcttcagcgagccccagcagccagcacctgcgatgaaatctcatcagatcgtcacttctccaccccgggcccagagtggtgccaggaaagcccgaggggaggctaagaagtgccgcaaggtgtatggcatcgagcaccgggaccagtggtgcacggcctgccggtggaagaaggcctgccagcgctttctggactgagctgtgctgcaggttctactctgttcctggccctgccggcagccactgacaagaggccagtgtgtcaccagccctcagcagaaaccgaaagagaaagaacggaaacacggagtttgggctctgttggctaaggtgtaacacttaaagcaattttctcccattgtgcgaacattttattttttaaaaaaaagaaacaaaaatatttttccccctaaaataggagagagccaaaactgaccaaggctattcagcagtgaaccagtgactaaagaattaattaccctccgtttcccacatccccactctctaggggattagcttgtgcgtgtcaaaagaaggaacagctcgttctgcttcctgctgagtcggtgaattctttgctttctaaactcttccagaaaggactgtgagcaagatgaatttacttttctt

SEQ ID NO: 345 - protein, 143 aa, Homo Sapiens
MAMHFIFSDTAVLLFDFWSVHSPAGMALSVLVLLLLAVLYEGIKVGKAKLLNQVLVNLPTSISQQTIAETDGDSAGSDSFPVGRTHHRWYLCHFGQSLIHVIQVVIGYFIMLAVMSYNTWIFLGVVLGSAVGYYLAYPLLSTA

SEQ ID NO: 346 - DNA, 1698 bp, Homo Sapiens
tcggcacaggagcgaggagacccgagagcagacgcgccctggcgcccgccctgcgcagtcaccatggcgatgcatttcatcttctcagatacagcggtgcttctgtttgatttctggagtgtccacagtcctgctggcatggccctttcggtgttggtgctcctgcttctggctgtactgtatgaaggcatcaaggttggcaaagccaagctgctcaaccaggtactggtgaacctgccaacctccatcagccagcagaccatcgcagagacagacggggactctgcaggctcagattcattccctgttggcagaacccaccacaggtggtacttgtgtcactttggccagtctctaatccatgtcatccaggtggtcatcggctacttcatcatgctggccgtaatgtcctacaacacctggattttccttggtgtggtcttgggctctgctgtgggctactacctagcttacccacttctcagcacagcttagatggtgaggaacgtgcaggcactgaggctggagggacatggagccccctcttccagacactatacttccaactgccctttcttctgatggctattcctccaccttattcccagcccctggaaactttgagctgaagccagcacttgctccctggagttcggaagccattgcagcaaccttccttctcagccagcctacgtagggcccaggcatggtcttgtgtcttaagacagctgctgtgaccaaagggagaatggagataacaggggtggcagggttactgagcccatgacaatgcttctctgtgactcaaaccaggaatttccaaagatttcaagccagggagaagggttcttggtgatgcagggcatggaacctggacaccctcagctctcctgctttgtgccttatctacaggagcatcgcccattggacttcctgacctcttctgtctttgagggacagagaccaagctagatcctttttctcacctttctgcctttggaacacatgaagatcatctcgtctatggatcatgttgacaaactaagttttttttatttttcccattgaactcctagttggcaattttgcacattcatacaaaaaaatttttaatgaaatgatttcattgattcatgatggatggcagaaactgctgagacctatttccctttcttggggagagaataagtgacagctgattaaaggcagagacacaggactgctttcaggctcctggtttattctctgattgactgagctccttccaccagaaggcactgcctgcaggaagaagatgatctgatggccgtgggtgtctgggaagctcttcgtggcctcaatgccctcctttatcctcatctttcttctatgcagaacaaaaagctgcatctaataatgttcaatacttaatattctctatttattacttactgcttactcgtaatgatctagtggggaaacatgattcattcacttaaaatactgattaagccatgggcaggtactgactgaagatgcaatccaaccaaagccattacattttttgagttagatgggactctctggatagttgaacctcttcactttataaaaaaggaaagagagaaaatcactgctgtatactaaatacctcacagattagatgaaaagatggttgtaagctttgggaattaaaaacaaatacattttagtaaatat

SEQ ID NO: 347 - protein, 508 aa, Homo Sapiens
MSRFVQDLSKAMSQDGASQFQEVIRQELELSVKKELEKILTTASSHEFEHTKKDLDGFRKLFHRFLQEKGPSVDWGKIQRPPEDSIQPYEKIKARGLPDNISSVLNKLVVVKLNGGLGTSMGCKGPKSLIGVRNENTFLDLTVQQIEHLNKTYNTDVPLVLMNSFNTDEDTKKILQKYNHCRVKIYTFNQSRYPRINKESLRPVAKDVSYSGENTEAWYPPGHGDIYASFYNSGLLDTFIGEGKEYIFVSNIDNLGATVDLYILNHLINPPNGKRCEFVMEVTNKTRADVKGGTLTQYEGKLRLVEIAQVPKAHVDEFKSVSKFKIFNTNNLWISLAAVKRLQEQNAIDMEIIVNAKTLDGGLNVIQLETAVGAAIKSFENSLGINVPRSRFLPVKTTSDLLLVMSNLYSLNAGSLTMSEKREFPTVPLVKLGSSFTKVQDYLRRFESIPDMLELDHLTVSGDVTFGKNVSLKGTVIIIANHGDRIDIPPGAVLENKIVSGNLRILDH

SEQ ID NO: 348 - DNA, 1832 bp, Homo Sapiens
aggagaggaagagagacctgccctgtagcgtgactcctctagaaaaaaaaaaaaaaagccggagtattttactaagcccctaaaatgtcgagatttgtacaagatcttagcaaagcaatgtctcaagatggtgcttctcagttccaagaagtcattcggcaagagctagaattatctgtgaagaaggaactagaaaaaatactcaccacagcatcatcacatgaatttgagcacaccaaaaaagacctggatggatttcggaagctatttcatagatttttgcaagaaaaggggccttctgtggattggggaaaaatccagagaccccctgaagattcgattcaaccctatgaaaagataaaggccaggggcctgcctgataatatatcttccgtgttgaacaaactagtggtggtgaaactcaatggtggtttgggaaccagcatgggctgcaaaggccctaaaagtctgattggtgtgaggaatgagaatacctttctggatctgactgttcagcaaattgaacatttgaacaaaacctacaatacagatgtccctcttgttttaatgaactcttttaacacggatgaagataccaaaaaaatactacagaagtacaatcattgtcgtgtgaaaatctacactttcaatcaaagcaggtacccgaggattaataaagaatctttacggcctgtagcaaaggacgtgtcttactcaggggaaaatacagaagcttggtaccctccaggtcatggtgatatttacgccagtttctacaactctggattgcttgatacctttataggagaaggcaaagagtatatttttgtgtctaacatagataatctgggtgccacagtggatctgtatattcttaatcatctaatcaacccacccaatggaaaacgctgtgaatttgtcatggaagtcacaaataaaacacgtgcagatgtaaagggcgggacactcactcaatatgaaggcaaactgagactggtggaaattgctcaagtgccaaaagcacatgttgacgagttcaagtctgtatcaaagttcaaaatatttaatacaaacaacctatggatttctcttgcagcagttaaaagactgcaggagcaaaatgccattgacatggaaatcattgtgaatgcaaagactttggatggaggcctgaatgtcattcaattagaaactgcagtaggggctgccatcaaaagctttgagaattctctaggtattaatgtgccaaggagccgttttctgcctgtcaaaaccacatcagatctcttgctggtgatgtcaaacctctatagtcttaatgcaggatctctgacaatgagtgaaaagcgggaatttcctacagtgcccttggttaaattaggcagttcttttacgaaggttcaagattatctaagaagatttgaaagtataccagatatgcttgaattggatcacctcacagtttcaggagatgtgacatttggaaaaaatgtttcattaaagggaacggttatcatcattgcaaatcatggtgacagaattgatatcccacctggagcagtattagagaacaagatagtgtctggaaaccttcgcatcttggaccactgaaatgaaaaatactgtggacacttaaataatgggctagtttcttacaatgaaatgttctctaggatttaggcactaaaaggtactttactatgttactgtaccctgcagtgttgatttttaaaatagagttttctgcagtatgcttttagtctaagaaaagcacagatggtgcaatactttccttctttgaagagatcccaaagttagttactcttaagtgc

SEQ ID NO: 349 - protein, 535 aa, Homo Sapiens
MKLWVSALLMAWFGVLSCVQAEFFTSIGHMTDLIYAEKELVQSLKEYILVEEAKLSKIKSWANKMEALTSKSAADAEGYLAHPVNAYKLVKRLNTDWPALEDLVLQDSAAGFIANLSVQRQFFPTDEDEIGAAKALMRLQDTYRLDPGTISRGELPGTKYQAMLSVDDCFGMGRSAYNEGDYYHTVLWMEQVLKQLDAGEEATTTKSQVLDYLSYAVFQLGDLHRALELTRRLLSLDPSHERAGGNLRYFEQLLEEEREKTLTNQTEAELATPEGIYERPVDYLPERDVYESLCRGEGVKLTPRRQKRLFCRYHHGNRAPQLLIAPFKEEDEWDSPHIVRYYDVMSDEEIERIKEIAKPKLARATVRDPKTGVLTVASYRVSKSSWLEEDDDPVVARVNRRMQHITGLTVKTAELLQVANYGVGGQYEPHFDFSRNDERDTFKHLGTGNRVATFLNYMSDVEAGGATVFPDLGAAIWPKKGTAVFWYNLLRSGEGDYRTRHAACPVLVGCKWVSNKWFHERGQEFLRPCGSTEVD

SEQ ID NO: 350 - DNA, 2194 bp, Homo Sapiens
ggggaaggaacactgtaggggatagctgtccacggacgctgtctacaagaccctggagtgagataacgtgcctggtactgtgccctgcatgtgtaagatgcccagttgaccttcgcagcaggagcctggatcaggcacttcctgcctcaggtattgctggacagcccagacacttccctctgtgaccatgaaactctgggtgtctgcattgctgatggcctggtttggtgtcctgagctgtgtgcaggccgaattcttcacctctattgggcacatgactgacctgatttatgcagagaaagagctggtgcagtctctgaaagagtacatccttgtggaggaagccaagctttccaagattaagagctgggccaacaaaatggaagccttgactagcaagtcagctgctgatgctgagggctacctggctcaccctgtgaatgcctacaaactggtgaagcggctaaacacagactggcctgcgctggaggaccttgtcctgcaggactcagctgcaggttttatcgccaacctctctgtgcagcggcagttcttccccactgatgaggacgagataggagctgccaaagccctgatgagacttcaggacacatacaggctggacccaggcacaatttccagaggggaacttccaggaaccaagtaccaggcaatgctgagtgtggatgactgctttgggatgggccgctcggcctacaatgaaggggactattatcatacggtgttgtggatggagcaggtgctaaagcagcttgatgccggggaggaggccaccacaaccaagtcacaggtgctggactacctcagctatgctgtcttccagttgggtgatctgcaccgtgccctggagctcacccgccgcctgctctcccttgacccaagccacgaacgagctggagggaatctgcggtactttgagcagttattggaggaagagagagaaaaaacgttaacaaatcagacagaagctgagctagcaaccccagaaggcatctatgagaggcctgtggactacctgcctgagagggatgtttacgagagcctctgtcgtggggagggtgtcaaactgacaccccgtagacagaagaggcttttctgtaggtaccaccatggcaacagggccccacagctgctcattgcccccttcaaagaggaggacgagtgggacagcccgcacatcgtcaggtactacgatgtcatgtctgatgaggaaatcgagaggatcaaggagatcgcaaaacctaaacttgcacgagccaccgttcgtgatcccaagacaggagtcctcactgtcgccagctaccgggtttccaaaagctcctggctagaggaagatgatgaccctgttgtggcccgagtaaatcgtcggatgcagcatatcacagggttaacagtaaagactgcagaattgttacaggttgcaaattatggagtgggaggacagtatgaaccgcacttcgacttctctaggaatgatgagcgagatactttcaagcatttagggacggggaatcgtgtggctactttcttaaactacatgagtgatgtagaagctggtggtgccaccgtcttccctgatctgggggctgcaatttggcctaagaagggtacagctgtgttctggtacaacctcttgcggagcggggaaggtgactaccgaacaagacatgctgcctgccctgtgcttgtgggctgcaagtgggtctccaataagtggttccatgaacgaggacaggagttcttgagaccttgtggatcaacagaagttgactgacatccttttctgtccttccccttcctggtccttcagcccatgtcaacgtgacagacacctttgtatgttccttgtatgttcctatcaggctgatttttggagaaatgaatgtttgtctggagcagagggagaccatactagggcgactcctgtgtgactgaagtcccagcccttccattcagcctgtgccatccctggccccaaggctaggatcaaagtggctgcagcagagttagctgtctagcgcctagcaaggtgcctttgtacctcaggtgttttaggtgtgagatgtttcagtgaaccaaagttctgataccttgtttacatgtttgtttttatggcatttctatctattgtggctttaccaaaaaataaaatgtccctaccagaagccttaaa

SEQ ID NO: 351 - protein, 359 aa, Homo Sapiens
MPAHLLQDDISSSYTTTTTITAPPPGVLQNGGDKLETMPLYLEDDIRPDIKDDIYDPTYKDKEGPSPKVEYVWRNIILMSLLHLGALYGITLIPTCKFYTWLWGVFYYFVSALGITAGAHRLWSHRSYKARLPLRLFLIIANTMAFQNDVYEWARDHRAHHKFSETHADPHNSRRGFFFSHVGWLLVRKHPAVKEKGSTLDLSDLEAEKLVMFQRRYYKPGLLMMCFILPTLVPWYFWGETFQNSVFVATFLRYAVVLNATWLVNSAAHLFGYRPYDKNISPRENILVSLGAVGEGFHNYHHSFPYDYSASEYRWHINFNTFFIDWMAALGLTYDRKKVSKAAILARIKRTGDGNYKSG

SEQ ID NO: 352 - DNA, 1470 bp, Homo Sapiens
gacggtcacccgttgccagctctagcctttaaattcccggctcggggacctccacgcaccgcggctagcgccgacaaccagctagcgtgcaaggcgccgcggctcagcgcgtaccggcgggtttcgaaaccgcagtcctccggcgaccccgaactccgctccggagcctcagccccctggaaagtgatcccggcatcggagagccaagatgccggcccacttgctgcaggacgatatctctagctcctataccaccaccaccaccattacagcgcctcctccaggggtcctgcagaatggaggagataagttggagacgatgcccctctacttggaagacgacattcgccctgatataaaagatgatatatatgaccccacctacaaggataaggaaggcccaagccccaaggttgaatatgtctggagaaacatcatccttatgtctctgctacacttgggagccctgtatgggatcactttgattcctacctgcaagttctacacctggctttggggggtattctactattttgtcagtgccctgggcataacagcaggagctcatcgtctgtggagccaccgctcttacaaagctcggctgcccctacggctctttctgatcattgccaacacaatggcattccagaatgatgtctatgaatgggctcgtgaccaccgtgcccaccacaagttttcagaaacacatgctgatcctcataattcccgacgtggctttttcttctctcacgtgggttggctgcttgtgcgcaaacacccagctgtcaaagagaaggggagtacgctagacttgtctgacctagaagctgagaaactggtgatgttccagaggaggtactacaaacctggcttgctgatgatgtgcttcatcctgcccacgcttgtgccctggtatttctggggtgaaacttttcaaaacagtgtgttcgttgccactttcttgcgatatgctgtggtgcttaatgccacctggctggtgaacagtgctgcccacctcttcggatatcgtccttatgacaagaacattagcccccgggagaatatcctggtttcacttggagctgtgggtgagggcttccacaactaccaccactcctttccctatgactactctgccagtgagtaccgctggcacatcaacttcaacacattcttcattgattggatggccgccctcggtctgacctatgaccggaagaaagtctccaaggccgccatcttggccaggattaaaagaaccggagatggaaactacaagagtggctgagtttggggtccctcaggttcctttttcaaaaaccagccaggcagaggttttaatgtctgtttattaactactgaataatgctaccaggatgctaaagatgatgatgttaacccattccagtacagtattcttttaaaattcaaaagtattgaaagccaaaaaaaaaaaaaaaaaaaaaaaaa

SEQ ID NO: 353 - protein, 928 aa, Homo Sapiens
MEPRDGSPEARSSDSESASASSSGSERDAGPEPDKAPRRLNKRRFPGLRLFGHRKAITKSGLQHLAPPPPTPGAPCSESERQIRSTVDWSESATYGEHIWFETNVSGDFCYVGEQYCVARMLKSVSRRKCAACKIVVHTPCIEQLEKINFRCKPSFRESGSRNVREPTFVRHHWVHRRRQDGKCRHCGKGFQQKFTFHSKEIVAISCSWCKQAYHSKVSCFMLQQIEEPCSLGVHAAVVIPPTWILRARRPQNTLKASKKKKRASFKRKSSKKGPEEGRWRPFIIRPTPSPLMKPLLVFVNPKSGGNQGAKIIQSFLWYLNPRQVFDLSQGGPKEALEMYRKVHNLRILACGGDGTVGWILSTLDQLRLKPPPPVAILPLGTGNDLARTLNWGGGYTDEPVSKILSHVEEGNVVQLDRWDLHAEPNPEAGPEDRDEGATDRLPLDVFNNYFSLGFDAHVTLEFHESREANPEKFNSRFRNKMFYAGTAFSDFLMGSSKDLAKHIRVVCDGMDLTPKIQDLKPQCVVFLNIPRYCAGTMPWGHPGEHHDFEPQRHDDGYLEVIGFTMTSLAALQVGGHGERLTQCREVVLTTSKAIPVQVDGEPCKLAASRIRIALRNQATMVQKAKRRSAAPLHSDQQPVPEQLRIQVSRVSMHDYEALHYDKEQLKEASVPLGTVVVPGDSDLELCRAHIERLQQEPDGAGAKSPTCQKLSPKWCFLDATTASRFYRIDRAQEHLNYVTEIAQDEIYILDPELLGASARPDLPTPTSPLPTSPCSPTPRSLQGDAAPPQGEELIEAAKRNDFCKLQELHRAGGDLMHRDEQSRTLLHHAVSTGSKDVVRYLLDHAPPEILDAVEENGETCLHQAAALGQRTICHYIVEAGASLMKTDQQGDTPRQRAEKAQDTELAAYLENRQHYQMIQREDQETAV

SEQ ID NO: 354 - DNA, 3490 bp, Homo Sapiens
gcggcgcggagcgggcgtgctgagccccggccgccggcccggcatgggcgtctcccgcgggccctccgccggccggggctagggccggatggagccgcgggacggtagccccgaggcccggagcagcgactccgagtcggcttccgcctcgtccagcggctccgagcgcgacgccggtcccgagccggacaaggcgccgcggcgactcaacaagcggcgcttcccggggctgcggctcttcgggcacaggaaagccatcaccaagtcgggcctccagcacctggccccccctccgcccacccctggggccccgtgcagcgagtcagagcggcagatccggagtacagtggactggagcgagtcagcgacatatggggagcacatctggttcgagaccaacgtgtccggggacttctgctacgttggggagcagtactgtgtagccaggatgctgaagtcagtgtctcgaagaaagtgcgcagcctgcaagattgtggtgcacacgccctgcatcgagcagctggagaagataaatttccgctgtaagccgtccttccgtgaatcaggctccaggaatgtccgcgagccaacctttgtacggcaccactgggtacacagacgacgccaggacggcaagtgtcggcactgtgggaagggattccagcagaagttcaccttccacagcaaggagattgtggccatcagctgctcgtggtgcaagcaggcataccacagcaaggtgtcctgcttcatgctgcagcagatcgaggagccgtgctcgctgggggtccacgcagccgtggtcatcccgcccacctggatcctccgcgcccggaggccccagaatactctgaaagcaagcaagaagaagaagagggcatccttcaagaggaagtccagcaagaaagggcctgaggagggccgctggagacccttcatcatcaggcccaccccctccccgctcatgaagcccctgctggtgtttgtgaaccccaagagtgggggcaaccagggtgcaaagatcatccagtctttcctctggtatctcaatccccgacaagtcttcgacctgagccagggagggcccaaggaggcgctggagatgtaccgcaaagtgcacaacctgcggatcctggcgtgcgggggcgacggcacggtgggctggatcctctccaccctggaccagctacgcctgaagccgccaccccctgttgccatcctgcccctgggtactggcaacgacttggcccgaaccctcaactggggtgggggctacacagatgagcctgtgtccaagatcctctcccacgtggaggaggggaacgtggtacagctggaccgctgggacctccacgctgagcccaaccccgaggcagggcctgaggaccgagatgaaggcgccaccgaccggttgcccctggatgtcttcaacaactacttcagcctgggctttgacgcccacgtcaccctggagttccacgagtctcgagaggccaacccagagaaattcaacagccgctttcggaataagatgttctacgccgggacagctttctctgacttcctgatgggcagctccaaggacctggccaagcacatccgagtggtgtgtgatggaatggacttgactcccaagatccaggacctgaaaccccagtgtgttgttttcctgaacatccccaggtactgtgcgggcaccatgccctggggccaccctggggagcaccacgactttgagccccagcggcatgacgacggctacctcgaggtcattggcttcaccatgacgtcgttggccgcgctgcaggtgggcggacacggcgagcggctgacgcagtgtcgcgaggtggtgctcaccacatccaaggccatcccggtgcaggtggatggcgagccctgcaagcttgcagcctcacgcatccgcatcgccctgcgcaaccaggccaccatggtgcagaaggccaagcggcggagcgccgcccccctgcacagcgaccagcagccggtgccagagcagttgcgcatccaggtgagtcgcgtcagcatgcacgactatgaggccctgcactacgacaaggagcagctcaaggaggcctctgtgccgctgggcactgtggtggtcccaggagacagtgacctagagctctgccgtgcccacattgagagactccagcaggagcccgatggtgctggagccaagtccccgacatgccagaaactgtcccccaagtggtgcttcctggacgccaccactgccagccgcttctacaggatcgaccgagcccaggagcacctcaactatgtgactgagatcgcacaggatgagatttatatcctggaccctgagctgctgggggcatcggcccggcctgacctcccaacccccacttcccctctccccacctcaccctgctcacccacgccccggtcactgcaaggggatgctgcaccccctcaaggtgaagagctgattgaggctgccaagaggaacgacttctgtaagctccaggagctgcaccgagctgggggcgacctcatgcaccgagacgagcagagtcgcacgctcctgcaccacgcagtcagcactggcagcaaggatgtggtccgctacctgctggaccacgcccccccagagatccttgatgcggtggaggaaaacggggagacctgtttgcaccaagcagcggccctgggccagcgcaccatctgccactacatcgtggaggccggggcctcgctcatgaagacagaccagcagggcgacactccccggcagcgggctgagaaggctcaggacaccgagctggccgcctacctggagaaccggcagcactaccagatgatccagcgggaggaccaggagacggctgtgtagcgggccgcccacgggcagcaggagggacaatgcggccaggggacgagcgccttccttgcccacctcactgccacattccagtgggacggccacggggggacctaggccccagggaaagagccccatgccgccccctaaggagccgcccagacctagggctggactcaggagctgggggggcctcacctgttcccctgaggaccccgccggacccggaggctcacagggaacaagacacggctgggttggatatgcctttgccggggttctggggcagggcgctccctggccgcagcagatgccctcccaggagtggaggggctggagagggggaggccttcgggaagaggcttcctgggccccctggtcttcggccgggtccccagcccccgctcctgccccaccccacctcctccgggcttcctcccggaaactcagcgcctgctgcacttgcctgccctgccttgcttggcacccgctccggcgaccctccccgctcccctgtcatttcatcgcggactgtgcggcctgggggtggggggcgggactctcacggtgacatgtttacagctgggtgtgactcagtaaagtggatttttttttctttaaaaaaaa

SEQ ID NO: 355 - protein, 480 aa, Homo Sapiens
MQIPRAALLPLLLLLLAAPASAQLSRAGRSAPLAAGCPDRCEPARCPPQPEHCEGGRARDACGCCEVCGAPEGAACGLQEGPCGEGLQCVVPFGVPASATVRRRAQAGLCVCASSEPVCGSDANTYANLCQLRAASRRSERLHRPPVIVLQRGACGQGQEDPNSLRHKYNFIADVVEKIAPAVVHIELFRKLPFSKREVPVASGSGFIVSEDGLIVTNAHVVTNKHRVKVELKNGATYEAKIKDVDEKADIALIKIDHQGKLPVLLLGRSSELRPGEFVVAIGSPFSLQNTVTTGIVSTTQRGGKELGLRNSDMDYIQTDAIINYGNSGGPLVNLDGEVIGINTLKVTAGISFAIPSDKIKKFLTESHDRQAKGKAITKKKYIGIRMMSLTSSKAKELKDRHRDFPDVISGAYIIEVIPDTPAEAGGLKENDVIISINGQSVVSANDVSDVIKRESTLNMVVRRGNEDIMITVIPEEIDP

SEQ ID NO: 356 - DNA, 2036 bp, Homo Sapiens
ccggccctcgccctgtccgccgccaccgccgccgccgccagagtcgccatgcagatcccgcgcgccgctcttctcccgctgctgctgctgctgctggcggcgcccgcctcggcgcagctgtcccgggccggccgctcggcgcctttggccgccgggtgcccagaccgctgcgagccggcgcgctgcccgccgcagccggagcactgcgagggcggccgggcccgggacgcgtgcggctgctgcgaggtgtgcggcgcgcccgagggcgccgcgtgcggcctgcaggagggcccgtgcggcgaggggctgcagtgcgtggtgcccttcggggtgccagcctcggccacggtgcggcggcgcgcgcaggccggcctctgtgtgtgcgccagcagcgagccggtgtgcggcagcgacgccaacacctacgccaacctgtgccagctgcgcgccgccagccgccgctccgagaggctgcaccggccgccggtcatcgtcctgcagcgcggagcctgcggccaagggcaggaagatcccaacagtttgcgccataaatataactttatcgcggacgtggtggagaagatcgcccctgccgtggttcatatcgaattgtttcgcaagcttccgttttctaaacgagaggtgccggtggctagtgggtctgggtttattgtgtcggaagatggactgatcgtgacaaatgcccacgtggtgaccaacaagcaccgggtcaaagttgagctgaagaacggtgccacttacgaagccaaaatcaaggatgtggatgagaaagcagacatcgcactcatcaaaattgaccaccagggcaagctgcctgtcctgctgcttggccgctcctcagagctgcggccgggagagttcgtggtcgccatcggaagcccgttttcccttcaaaacacagtcaccaccgggatcgtgagcaccacccagcgaggcggcaaagagctggggctccgcaactcagacatggactacatccagaccgacgccatcatcaactatggaaactcgggaggcccgttagtaaacctggacggtgaagtgattggaattaacactttgaaagtgacagctggaatctcctttgcaatcccatctgataagattaaaaagttcctcacggagtcccatgaccgacaggccaaaggaaaagccatcaccaagaagaagtatattggtatccgaatgatgtcactcacgtccagcaaagccaaagagctgaaggaccggcaccgggacttcccagacgtgatctcaggagcgtatataattgaagtaattcctgataccccagcagaagctggtggtctcaaggaaaacgacgtcataatcagcatcaatggacagtccgtggtctccgccaatgatgtcagcgacgtcattaaaagggaaagcaccctgaacatggtggtccgcaggggtaatgaagatatcatgatcacagtgattcccgaagaaattgacccataggcagaggcatgagctggacttcatgtttccctcaaagactctcccgtggatgacggatgaggactctgggctgctggaataggacactcaagacttttgactgccattttgtttgttcagtggagactccctggccaacagaatccttcttgatagtttgcaggcaaaacaaatgtaatgttgcagatccgcaggcagaagctctgcccttctgtatcctatgtatgcagtgtgctttttcttgccagcttgggccattcttgcttagacagtcagcatttgtctcctcctttaactgagtcatcatcttagtccaactaatgcagtcgatacaatgcgtagatagaagaagccccacgggagccaggatgggactggtcgtgtttgtgcttttctccaagtcagcacccaaaggtcaatgcacagagaccccgggtgggtgagcgctggcttctcaaacggccgaagttgcctcttttaggaatctctttggaattgggagcacgatgactctgagtttgagctattaaagtacttcttacaaa

SEQ ID NO: 357 - protein, 159 aa, Homo Sapiens
MALETICRPSGRKSSKMQAFRIWDVNQKTFYLRNNQLVAGYLQGPNVNLEEKIDVVPIEPHALFLGIHGGKMCLSCVKSGDETRLQLEAVNITDLSENRKQDKRFAFIRSDSGPTTSFESAACPGWFLCTAMEADQPVSLTNMPDEGVMVTKFYFQEDE

SEQ ID NO: 358 - DNA, 602 bp, Homo Sapiens
agctccaccctgggagggactgtggcccaggtactgcccgggtgctactttatgggcagcagctcagttgagttagagtctggaagacctcagaagacctcctgtcctatgaggccctccccatggctttagagacgatctgccgaccctctgggagaaaatccagcaagatgcaagccttcagaatctgggatgttaaccagaagaccttctatctgaggaacaaccaactagttgctggatacttgcaaggaccaaatgtcaatttagaagaaaagatagatgtggtacccattgagcctcatgctctgttcttgggaatccatggagggaagatgtgcctgtcctgtgtcaagtctggtgatgagaccagactccagctggaggcagttaacatcactgacctgagcgagaacagaaagcaggacaagcgcttcgccttcatccgctcagacagtggccccaccaccagttttgagtctgccgcctgccccggttggttcctctgcacagcgatggaagctgaccagcccgtcagcctcaccaatatgcctgacgaaggcgtcatggtcaccaaattctacttccaggaggacgagtag

SEQ ID NO: 359 - protein, 619 aa, Homo Sapiens
MIPNGYLMFEDENFIESSVAKLNALRKSGQFCDVRLQVCGHEMLAHRAVLACCSPYLFEIFNSDSDPHGISHVKFDDLNPEAVEVLLNYAYTAQLKADKELVKDVYSAAKELKMDRVKQVCGDYLLSRMDVTSCISYRNFASCMGDSHLLNKVDAYIQEHLLQISEEEEFLKLPRLKLEVMLEDNVCLPSNGKLYTKVINWVQRSIWENGDSLEELMEEVQTLYYSADHKLLDGNLLDGQAEVFGSDDDHIQFVQKKPPRENGHKQISSSSTGCLSSPNATVQSPKHEWKIVASEKTSNNTYLCLAVLDGIFCVIFLHGRNSPQSSPTSTPKLSKSLSFEMQQDELIEKPMSPMQYARSGLGTAEMNGKLIAAGGYNREECLRTVECYNPHTDHWSFLAPMRTPRARFQMAVLMGQLYVVGGSNGHSDDLSCGEMYDSNIDDWIPVPELRTNRCNAGVCALNGKLYIVGGSDPYGQKGLKNCDVFDPVTKLWTSCAPLNIRRHQSAVCELGGYLYIIGGAESWNCLNTVERYNPENNTWTLIAPMNVARRGAGVAVLNGKLFVCGGFDGSHAISCVEMYDPTRNEWKMMGHMTSPRSNAGIATVGNTIYAVEDSMAMNF

SEQ ID NO: 360 - DNA, 2752 bp, Homo Sapiens
agtgtctcccggtcgcgcgtggaggtcggtcgctcagagctgctgggcgcagtttctccgcctgctgcttcggcgcggctgtatcggcgagcgagcgagttcccgcgagttctcggtggcgctcccccttcctttcagtctccacggactggcccctcgtccttctacttgaccgctcccgtcttctgccgccttctggcgctttccgttgggccgattcccgcccgcttcctcctgcttcccatcgaagctctagaaatgaatgtttccatctcttcagagatgaaccagattatgatgcatcattatcacagaagaaattcgtgtctatagcttttaaggacttgattacatcattttcaagcctgatagttttggaatcaccattagagcttaagacacacctgccttcatttcaaccacctgtcttcataccctgacgaagtgcaccttttaacactcctttgtccttggattacttaagagttcccagaaatacatttgccaccaacagagtagccaaatttataaggaaaaatgattcccaatggatatttgatgtttgaggatgaaaattttattgagtcttctgttgccaaattaaatgccctgaggaaaagtggccagttctgtgatgttcgacttcaggtctgtggccatgaaatgttagcacacagagcagtgctagcttgctgcagtccctatttatttgaaatctttaatagtgatagtgatcctcatggaatttctcacgttaaatttgatgatctcaatccagaagctgttgaagtcttgttgaattatgcctacactgctcagttgaaagcagataaggaattggtaaaagatgtttattctgcagcaaaagagctgaagatggatcgagtaaagcaggtttgtggtgattatttactgtctagaatggatgttaccagctgcatctcttaccgaaattttgcaagttgtatgggagactcccatttgttgaataaggttgatgcttatattcaggagcatttgttacaaatttctgaagaggaggagtttcttaagcttccaaggctaaagttggaggtaatgcttgaagataatgtttgcttgcccagcaatggcaaattatatacaaaggtaatcaactgggtgcagcgtagcatctgggagaatggagacagtctggaagagctgatggaagaggttcaaaccttgtactactcagctgatcacaagctgcttgatgggaacctactagatggacaggctgaggtgtttggcagtgatgatgaccacattcagtttgtgcagaaaaagccaccacgtgagaatggccataagcagataagtagcagttcaactggatgtctctcttctccaaatgctacagtacaaagccctaagcatgagtggaaaatcgttgcttcagaaaagacttcaaataacacttacttgtgcctggctgtgctggatggtatattctgtgtcatttttcttcatgggagaaacagcccacagagctcaccaacaagtactccaaaactaagtaagagtttaagctttgagatgcaacaagatgagctaatcgaaaagcccatgtctcctatgcagtacgcacgatctggtctgggaacagcagagatgaatggcaaactcatagctgcaggtggctataacagagaggaatgtcttcgaacagtcgaatgctataatccacatacagatcactggtcctttcttgctcccatgagaacaccaagagcccgatttcaaatggctgtactcatgggccagctctatgtggtaggtggatcaaatggccactcagatgacctgagttgtggagagatgtatgattcaaacatagatgactggattcctgttccagaattgagaactaaccgttgtaatgcaggagtgtgtgctctgaatggaaagttatacatcgttggtggctctgatccatatggtcaaaaaggactgaaaaattgtgatgtatttgatcctgtaacaaagttgtggacaagctgtgcccctcttaacattcggagacaccagtctgcagtctgtgagcttggtggttatttgtacataatcggaggtgcagaatcttggaattgtctgaacacagtagaacgatacaatcctgaaaataatacctggactttaattgcacccatgaatgtggctaggcgaggagctggagtggctgttcttaatggaaaactgtttgtatgtggtggctttgatggttctcatgccatcagttgtgtggaaatgtatgatccaactagaaatgaatggaagatgatgggacatatgacttcaccaaggagcaatgctgggattgcaactgtagggaacaccatttatgcagtggaggattcgatggcaatgaatttctgaatacggcggaagtctataaccttgagtcaaatgaatggagcccctatacaaagattttccagttttaacgggtttaagaccctctcaaactaacaggcttagtgatgtaattatggttagcagaggtacacttgtgaataaagagggtgggtggggatagatgttgctaacagcaacacaaagcttttgcatattgcatactattaaacatgctgtacatactttttgggtttatttgggaaggaatgcaaagatgaaggtctgtttgtgtacttttaagactttggttattttactttttggaaaagataaaccaagaattgattgggcacatcaaaaaaaaaaaaaaaaaaaa

SEQ ID NO: 361 - protein, 509 aa, Homo Sapiens
MVDGVMILPVLIMIALPSPSMEDEKPKVNPKLYMCVCEGLSCGNEDHCEGQQCFSSLSINDGFHVYQKGCFQVYEQGKMTCKTPPSPGQAVECCQGDWCNRNITAQLPTKGKSFPGTQNFHLEVGLIILSVVFAVCLLACLLGVALRKFKRRNQERLNPRDVEYGTIEGLITTNVGDSTLADLLDHSCTSGSGSGLPFLVQRTVARQITLLECVGKGRYGEVWRGSWQGENVAVKIFSSRDEKSWFRETELYNTVMLRHENILGFIASDMTSRHSSTQLWLITHYHEMGSLYDYLQLTTLDTVSCLRIVLSIASGLAHLHIEIFGTQGKPAIAHRDLKSKNILVKKNGQCCIADLGLAVMHSQSTNQLDVGNNPRVGTKRYMAPEVLDETIQVDCFDSYKRVDIWAFGLVLWEVARRMVSNGIVEDYKPPFYDVVPNDPSFEDMRKVVCVDQQRPNIPNRWFSDPTLTSLAKLMKECWYQNPSARLTALRIKKTLTKIDNSLDKLKTDC

SEQ ID NO: 362 - DNA, 2952 bp, Homo Sapiens
gaagcgaatagcgttttcagagatattgggcggctcaagggtcttactctgtcgcccagtctgtaatgcagtgctgtgaccatagcccactgcagcctccacctcccaggctcaagcagtccttcccccctcgccctcatgaatagctgggactacagcctggagcattggtaagcgtcacactgccaaagtgagagctgctggagaactcataatcccaggaacgcctcttctactctccgagtaccccagtgaccagagtgagagaagctctgaacgagggcacgcggcttgaaggactgtgggcagatgtgaccaagagcctgcattaagttgtacaatggtagatggagtgatgattcttcctgtgcttatcatgattgctctcccctcccctagtatggaagatgagaagcccaaggtcaaccccaaactctacatgtgtgtgtgtgaaggtctctcctgcggtaatgaggaccactgtgaaggccagcagtgcttttcctcactgagcatcaacgatggcttccacgtctaccagaaaggctgcttccaggtttatgagcagggaaagatgacctgtaagaccccgccgtcccctggccaagctgtggagtgctgccaaggggactggtgtaacaggaacatcacggcccagctgcccactaaaggaaaatccttccctggaacacagaatttccacttggaggttggcctcattattctctctgtagtgttcgcagtatgtcttttagcctgcctgctgggagttgctctccgaaaatttaaaaggcgcaaccaagaacgcctcaatccccgagacgtggagtatggcactatcgaagggctcatcaccaccaatgttggagacagcactttagcagatttattggatcattcgtgtacatcaggaagtggctctggtcttccttttctggtacaaagaacagtggctcgccagattacactgttggagtgtgtcgggaaaggcaggtatggtgaggtgtggaggggcagctggcaaggggaaaatgttgccgtgaagatcttctcctcccgtgatgagaagtcatggttcagggaaacggaattgtacaacactgtgatgctgaggcatgaaaatatcttaggtttcattgcttcagacatgacatcaagacactccagtacccagctgtggttaattacacattatcatgaaatgggatcgttgtacgactatcttcagcttactactctggatacagttagctgccttcgaatagtgctgtccatagctagtggtcttgcacatttgcacatagagatatttgggacccaagggaaaccagccattgcccatcgagatttaaagagcaaaaatattctggttaagaagaatggacagtgttgcatagcagatttgggcctggcagtcatgcattcccagagcaccaatcagcttgatgtggggaacaatccccgtgtgggcaccaagcgctacatggcccccgaagttctagatgaaaccatccaggtggattgtttcgattcttataaaagggtcgatatttgggcctttggacttgttttgtgggaagtggccaggcggatggtgagcaatggtatagtggaggattacaagccaccgttctacgatgtggttcccaatgacccaagttttgaagatatgaggaaggtagtctgtgtggatcaacaaaggccaaacatacccaacagatggttctcagacccgacattaacctctctggccaagctaatgaaagaatgctggtatcaaaatccatccgcaagactcacagcactgcgtatcaaaaagactttgaccaaaattgataattccctcgacaaattgaaaactgactgttgacattttcatagtgtcaagaaggaagatttgacgttgttgtcattgtccagctgggacctaatgctggcctgactggttgtcagaatggaatccatctgtctccctccccaaatggctgctttgacaaggcagacgtcgtacccagccatgtgttggggagacatcaaaaccaccctaacctcgctcgatgactgtgaactgggcatttcacgaactgttcacactgcagagactaatgttggacagacactgttgcaaaggtagggactggaggaacacagagaaatcctaaaagagatctgggcattaagtcagtggctttgcatagctttcacaagtctcctagacactccccacgggaaactcaaggaggtggtgaatttttaatcagcaatattgcctgtgcttctcttctttattgcactaggaattctttgcattccttacttgcactgttactcttaattttaaagacccaacttgccaaaatgttggctgcgtactccactggtctgtctttggataataggaattcaatttggcaaaacaaaatgtaatgtcagactttgctgcattttacacatgtgctgatgtttacaatgatgccgaacattaggaattgtttatacacaactttgcaaattatttattacttgtgcacttagtagtttttacaaaactgctttgtgcatatgttaaagcttatttttatgtggtcttatgattttattacagaaatgtttttaacactatactctaaaatggacattttcttttattatcagttaaaatcacattttaagtgcttcacatttgtatgtgtgtagactgtaactttttttcagttcatatgcagaacgtatttagccattacccacgtgacaccaccgaatatattatcgatttagaagcaaagatttcagtagaattttagtcctgaacgctacggggaaaatgcattttcttcagaattatccattacgtgcatttaaactctgccagaaaaaaataactattttgttttaatctactttttgtatttagtagttatttgtataaattaaataaactgttttcaagtc

SEQ ID NO: 363 - protein, 315 aa, Homo Sapiens
MYQVPLPLDRDGTLVRLRFTMVALVTVCCPLVAFLFCILWSLLFHFKETTATHCGATPCRMFSAASQPLDPDGTLFRLRFTAMVWWAITFPVFGFFFCIIWSLVFHFEYTVATDCGVPNYLPSVSSAIGGEVPQRYVWRFCIGLHSAPRFLVAFAYWNHYLSCTSPCSCYRPLCRLNFGLNVVENLALLVLTYVSSSEDFTIHENAFIVFIASSLGHMLLTCILWRLTKKHTVSQEDRKSYSWKQRLFIINFISFFSALAVYFRHNMYCEAGVYTIFAILEYTVVLTNMAFHMTAWWDFGNKELLITSQPEEKRF

SEQ ID NO: 364 - DNA, 2040 bp, Homo Sapiens
ggccttaccaatcgcgaaaacccgccgttcgcgctctgaccagcccgcagagccagcccccgaccccgggccacctgggcccccgggttccgccggcactctcgccaccaccgcgtgggtctgacaagatgtaccaggtcccactaccactggatcgggatgggaccctggtacggctccgcttcaccatggtggccctggtcacggtctgctgtccacttgtcgccttcctcttctgcatcctctggtccctgctcttccacttcaaggagacaacggccacacactgtggggccacgccctgcaggatgttctctgcggcctcccagcctttggaccccgatgggaccttgttccggcttcgcttcacagccatggtctggtgggccatcacttttcctgtgttcggcttcttcttctgcatcatctggtccctggtgttccactttgagtacacggtggccactgactgtggggtgcccaattacctgccctcggtgagctcagccatcggcggggaggtgccccagcgctacgtgtggcgtttctgcatcggcctgcactcggcgcctcgcttcttggtggccttcgcctactggaaccactacctcagctgcacctccccgtgttcctgctatcgcccgctctgccgcctcaacttcggcctcaatgtcgtggagaacctcgcgttgctagtgctcacttatgtctcctcctccgaggacttcaccatccacgaaaatgctttcattgtgttcattgcctcatccctcgggcacatgctcctcacctgcattctctggcggttgaccaagaagcacacagtaagtcaggaggatcgcaagtcctacagctggaaacagcggctcttcatcatcaacttcatctccttcttctcggcgctggctgtctactttcggcacaacatgtattgtgaggctggagtgtacaccatctttgccatcctggagtacactgttgtcttaaccaacatggcgttccacatgacggcctggtgggacttcgggaacaaggagctgctcataacctctcagcctgaggaaaagcgattctgaacccttcagtcctgcttgggaggacgcagcccactgcccagaaacaagaaacacgataccattctggccttccccaccccacatcctctcttggccttactgaagatgggggaagggtaagaaggaagggtgtaggccaaggctcaccccagtgctgctggcttctcctctccacccctcatatgggcgtggggtcctcaaacatcacctttacctgagaggccccaagaagctgagctggcagagagctccaccatttggtgctaaaaaaaaaaacgtcctgaggttcatgaccaccatccagtttctggcctttacacagtcacctttcactgaggtcaggagcccctgagcagtggctgctccctgacaaccacagccatttctctgcacgggggtcattcataggactaatgtatttcatgatctactgtgcacatccaggcctgtggccacagtcccctgctaaagttgctcaggtgttctagtcctgacttcacctttttgatttggtgtgtgccctagggtatgtacccttccccatctgagcctcggtgtgtccatgtgtctggcgggggatgggtggactgtatgatttccaaggactctaccagtcagtggttctgatgtcatcgggtggaggtggtgttctatacctaaaggatgacctgctccagaaacagcaccagcacagcatgtattttcttctcttctgaaagttctggcttgtagacccctcccctcctttgcaaaggtatgggatagaggggtcagatgcagatctctactgtaaaatgggctccctggtatctcctgtcttccctactgctccaaaccctaaattttggttgtacattttattttgaaaggaaaataaattttttttttgggccaacaaaaaaaaaaaaaaaaaaaaaaaaaaaaaaaaaaaaaaaaaaaaaaaaaaaaaaaaaaaaaaaaaaaa

SEQ ID NO: 365 - protein, 318 aa, Homo Sapiens
MMLSLNNLQNIIYNPVIPFVGTIPDQLDPGTLIVIRGHVPSDADRFQVDLQNGSSMKPRADVAFHFNPRFKRAGCIVCNTLINEKWGREEITYDTPFQKEKKSFEIVIMVLKAKFQVAVNGKHTLLYGHRIGPEKIDTLGIYGKVNIHSIGFSFSSDLQSTQASSLELTEISRENVPKSGTPQLRLPFAARLNTPMGPGRTVVVKGEVNANAKSFNVDLLAGKSKDIALHLNPRLNIKAFVRNSFLQESWGEEERNITSFPFSPGMYFEMIIYCDVREFKVAVNGVHSLEYKHRFKELSSIDTLEINGDIHLLEVRSW

SEQ ID NO: 366 - DNA, 1107 bp, Homo Sapiens
acacagaagagactccaatcgacaagaagctggaaaagaatgatgttgtccttaaacaacctacagaatatcatctataacccggtaatcccgtttgttggcaccattcctgatcagctggatcctggaactttgattgtgatacgtgggcatgttcctagtgacgcagacagattccaggtggatctgcagaatggcagcagcatgaaacctcgagccgatgtggcctttcatttcaatcctcgtttcaaaagggccggctgcattgtttgcaatactttgataaatgaaaaatggggacgggaagagatcacctatgacacgcctttccaaaaagagaaaaagtcttttgagatcgtgattatggtgctgaaggccaaattccaggtggctgtaaatggaaaacatactctgctctatggccacaggatcggcccagagaaaatagacactctgggcatttatggcaaagtgaatattcactcaattggttttagcttcagctcggacttacaaagtacccaagcatctagtctggaactgacagagataagtagagaaaatgttccaaagtctggcacgccccagcttaggctgccattcgctgcaaggttgaacacccccatgggccctggacgaactgtcgtcgttaaaggagaagtgaatgcaaatgccaaaagctttaatgttgacctactagcaggaaaatcaaaggatattgctctacacttgaacccacgcctgaatattaaagcatttgtaagaaattcttttcttcaggagtcctggggagaagaagagagaaatattacctctttcccatttagtcctgggatgtactttgagatgataatttattgtgatgttagagaattcaaggttgcagtaaatggcgtacacagcctggagtacaaacacagatttaaagagctcagcagtattgacacgctggaaattaatggagacatccacttactggaagtaaggagctggtagcctacctacacagctgctacaaaaaccaaaatacagaatggcttctgtgatactggccttgctgaaacgcatctcactgtcattctattgtttatattgttaaaatgacct

SEQ ID NO: 367 - protein, 558 aa, Homo Sapiens [sequence omitted]

SEQ ID NO: 368 - DNA, 1987 bp, Homo Sapiens
ctcgagagctccgccatggccgctctcacccgggacccccagttccagaagctgcagcaatggtaccgcgagcaccgctccgagctgaacctgcgccgcctcttcgatgccaacaaggaccgcttcaaccacttcagcttgaccctcaacaccaaccatgggcatatcctggtggattactccaagaacctggtgacggaggacgtgatgcggatgctggtggacttggccaagtccaggggcgtggaggccgcccgggagcggatgttcaatggtgagaagatcaactacaccgagggtcgagccgtgctgcacgtggctctgcggaaccggtcaaacacacccatcctggtagacggcaaggatgtgatgccagaggtcaacaaggttctggacaagatgaagtctttctgccagcgtgtccggagcggtgactggaaggggtacacaggcaagaccatcacggacgtcatcaacattggcattgtcggctccgacctgggacccctcatggtgactgaagcccttaagccatactcttcaggaggtccccgcgtctggtatgtctccaacattgatggaactcacattgccaaaaccctggcccagctgaacccggagtcctccctgttcatcattgcctccaagacctttactacccaggagaccatcacgaatgcagagacggcgaaggagtggtttctccaggcggccaaggatccttctgcagtggcgaagcactttgttgccctgtctactaacacaaccaaagtgaaggagtttggaattgaccctcaaaacatgttcgagttctgggattgggtgggaggacgctactcgctgtggtcggccatcggactctccattgccctgcacgtgggttttgacaacttcgagcagctgctctcgggggctcactggatggaccagcacttccgcacgacgcccctggagaagaacgcccccgtcttgctggccctgctgggtatctggtacatcaactgctttgggtgtgagacacacgccatgctgccctatgaccagtacctgcaccgctttgctgcgtacttccagcagggcgacatggagtccaatgggaaatacatcaccaaatctggaacccgtgtggaccaccagacaggccccattgtgtggggggagccagggaccaatggccagcatgctttttaccagctcatccaccaaggcaccaagatgataccctgtgacttcctcatcccggtccagacccagcaccccatacggaagggtctgcatcacaagatcctcctggccaacttcttggcccagacagaggccctgatgaggggaaaatcgacggaggaggcccgaaaggagctccaggctgcgggcaagagtccagaggaccttgagaggctgctgccacataaggtctttgaaggaaatcgcccaaccaactctattgtgttcaccaagctcacaccattcatgcttggagccttggtcgccatgtatgagcacaagatcttcgttcagggcatcatctgggacatcaacagctttgaccagtggggagtggagctgggaaagcagctggctaagaaaatagagcctgagcttgatggcagtgctcaagtgacctctcacgacgcttctaccaatgggctcatcaacttcatcaagcagcagcgcgaggccagagtccaataaactcgtgctcatctgcagcctcctctgtgactcccctttctcttctcgtccctcctccccggagccggcactgcatgttcctggacaccacccagagcaccctctggttgtgggcttggaccacgagcccttagcagggaaggctggtctcccccagcctaacccccagcccctccatgtctatgctccctctgtgttagaattggctgaagtgtttttgtgcagctgacttttctgacccatgttcacgttgttcacatcccatgtagaaaaacaaagatgccacggaggaggt

SEQ ID NO: 369 - protein, 336 aa, Homo Sapiens
MKKEHVLHCQFSAWYPFFRGVTIKSVILPLPQNVKDYLLDDGTLVVSGRDDPPTHSQPDSDDEAEEIQWSDDENTATLTAPEFPEFATKVQEPINSLGGSVFPKLNWSAPRDAYWIAMNSSLKCKTLSDIFLLFKSSDFITRDFTQPFIHCTDDSPDPCIEYELVLRKWCELIPGAEFRCFVKENKLIGISQRDYTQYYDHISKQKEEIRRCIQDFFKKHIQYKFLDEDFVFDIYRDSRGKVWLIDFNPFGEVTDSLLFTWEELIZENNLNGDFSEVDAQEQDSPAFRCTNSEVTVQPSPYLSYRLPKDFVDLSTGRDAHKLIDFLKLKRNQQEDD

SEQ ID NO: 370 - DNA, 1542 bp, Homo Sapiens
tgcgtttagggcgaagacggagttgtaaacttcttaaaattcctctctcgacacttcggtaattcctctttcgagactaaagctctttttgtatgcgtgtgtgtcaagcgtatgccccgggattctcctccgcttccttttctcggtcttccttcttgctttagggaccggaagagtccttgaaccaaaatagctcggcgggcacttccggggccggcgcccagagttccgggagggtgcaggcaggagagggaaaggcagcagcggcggcagctggaggatgaagaaggagcatgtgcttcactgccagttctccgcgtggtacccgttcttccgaggcgttaccatcaagagtgtcattcttccacttcctcagaatgtgaaggattatttactcgatgatggaactctggtggtttcaggaagggatgatccaccaacacattctcagccagacagtgatgatgaagcagaagaaatacagtggtctgatgatgagaacacagccacgcttacggcaccagaatttcctgagtttgccactaaagtccaggaacctatcaattccctcgggggcagtgtctttcctaagcttaattggagtgccccaagggatgcgtattggatagcaatgaatagttctctgaaatgtaaaaccctcagcgacatctttctgcttttcaagagttccgatttcatcactcgtgacttcactcagccgtttattcattgtactgatgattctccagatccatgtatagaatatgagctcgttctccgaaaatggtgtgaattgattcctggggctgagtttcgatgttttgtcaaggaaaacaagcttattggtatttctcaaagagactacacacaatactatgatcatatttctaaacaaaaggaagaaattcgcagatgcatacaagactttttcaagaaacacatacagtacaaattcttagatgaagactttgtgttcgatatatacagagacagtagggggaaggtgtggctcattgactttaatccatttggtgaagtcacagattcactgctgttcacctgggaagaactgatatctgagaacaacttaaacggcgattttagtgaagttgacgctcaagagcaggattccccagctttccgttgcacaaacagtgaagtgacagtccagcccagcccctatttgagttaccggctacccaaggactttgtagacctctctactgggagggacgctcacaagctaatagacttccttaagctgaagagaaatcagcaggaggacgactgatgagcgtactgtaactggagaagaggaggccccgccccaccgctccgggagctgctcatcagccgcaacttcctgccgaccctgatgcgggtgggccgagcagtgtggacatcagccactttttatattcatgtacattcacctggggaaaaaaacggagggactttgctacttgtaaaaataacataataaatagatcttaaacataggaaaaccatactgttctgataataaaatgctttctatgaaat

SEQ ID NO: 371 - protein, 412 aa, Homo Sapiens
MERIPSAQPPPACLPKAPGLEHGDLPGMYPAHMYQVYKSRRGIKRSEDSKETYKLPHRLIEKKRRDRINECIAQLKDLLPEHLKLTTLGHLEKAVVLELTLKHVKALTNLIDQQQQKIIALQSGLQAGELSGRNVETGQEMFCSGFQTCAREVLQYLAKHENTRDLKSSQLVTHLHRVVSELLQGGTSRKPSDPAPKVMDFKEKPSSPAKGSEGPGKNCVPVIQRTFAHSSGEQSGSDTDTDSGYGGESEKGDLRSEQPCFKSDHGRRFTMGERIGAIKQESEEPPTKKNRMQLSDDEGHFTSSDLISSPFLGPHPHQPPFCLPFYLIPPSATAYLPMLEKCWYPTSVPVLYPGLNASAAALSSFMNPDKISAPLLMPQRLPSPLPAHPSVDSSVLLQALKPIPPLNLETKD

SEQ ID NO: 372 - DNA, 2922 bp, Homo Sapiens
ggacaccgggccatgcacgcccccaactgaagctgcatctcaaagccgaagattccagcagcccaggggatttcaaagagctcagactcagaggaacatctgcggagagacccccgaagccctctccagggcagtcctcatccagacgctccgctagtgcagacaggagcgcgcagtggccccggctcgccgcgccatggagcggatccccagcgcgcaaccaccccccgcctgcctgcccaaagcaccgggactggagcacggagacctaccagggatgtaccctgcccacatgtaccaagtgtacaagtcaagacggggaataaagcggagcgaggacagcaaggagacctacaaattgccgcaccggctcatcgagaaaaagagacgtgaccggattaacgagtgcatcgcccagctgaaggatctcctacccgaacatctcaaacttacaactttgggtcacttggaaaaagcagtggttcttgaacttaccttgaagcatgtgaaagcactaacaaacctaattgatcagcagcagcagaaaatcattgccctgcagagtggtttacaagctggtgagctgtcagggagaaatgtcgaaacaggtcaagagatgttctgctcaggtttccagacatgtgcccgggaggtgcttcagtatctggccaagcacgagaacactcgggacctgaagtcttcgcagcttgtcacccacctccaccgggtggtctcggagctgctgcagggtggtacctccaggaagccatcagacccagctcccaaagtgatggacttcaaggaaaaacccagctctccggccaaaggttcggaaggtcctgggaaaaactgcgtgccagtcatccagcggactttcgctcactcgagtggggagcagagcggcagcgacacggacacagacagtggctatggaggagaatcggagaagggcgacttgcgcagtgagcagccgtgcttcaaaagtgaccacggacgcaggttcacgatgggagaaaggatcggcgcaattaagcaagagtccgaagaaccccccacaaaaaagaaccggatgcagctttcggatgatgaaggccatttcactagcagtgacctgatcagctccccgttcctgggcccacacccacaccagcctcctttctgcctgcccttctacctgatcccaccttcagcgactgcctacctgcccatgctggagaagtgctggtatcccacctcagtgccagtgctatacccaggcctcaacgcctctgccgcagccctctctagcttcatgaacccagacaagatctcggctcccttgctcatgccccagagactcccttctcccttgccagctcatccgtccgtcgactcttctgtcttgctccaagctctgaagccaatcccccctttaaacttagaaaccaaagactaaactctctaggggatcctgctgctttgctttccttcctcgctacttcctaaaaagcaacaaaaaagtttttgtgaatgctgcaagattgttgcattgtgtatactgagataatctgaggcatggagagcagattcagggtgtgtgtgtgtgtgtgtgtgtgtgtgtgtatgtgcgtgtgcgtgcacatgtgtgcctgcgtgttggtataggactttaaagctccttttggcatagggaagtcacgaaggattgcttgacatcaggagacttgggggggattgtagcagacgtctgggcttttccccacccagagaatagcccccttcgatacacatcagctggattttcaaaagcttcaaagtcttggtctgtgagtcactcttcagtttgggagctgggtctgtggctttgatcagaaggtactttcaaaagagggctttccagggctcagctcccaaccagctgttaggaccccacccttttgcctttattgtcgacgtgactcaccagacgtcggggagagagagcagtcagaccgagctttctgctaacatggggaggtagcaggcactggcatagcacggtagtggtttggggaggtttccgcaggtctgctccccacccctgcctcggaagaataaagagaatgtagttccctactcaggctttcgtagtgattagcttactaaggaactgaaaatgggccccttgtacaagctgagctgccccggagggagggaggagttccctgggcttctggcacctgtttctaggcctaaccattagtacttactgtgcagggaaccaaaccaaggtctgagaaatgcggacaccccgagcgagcaccccaaagtgcacaaagctgagtaaaaagctgcccccttcaaacagaactagactcagttttcaattccatcctaaaactccttttaaccaagcttagcttctcaaaggcctaaccaagccttggcaccgccagatcctttctgtaggctaattcctcttgcccaacggcatatggagtgtccttattgctaaaaaggattccgtctccttcaaagaagttttatttttggtccagagtacttgttttcccgatgtgtccagccagctccgcagcagcttttcaagatgcactatgcctgattgctgatcgtgttttaactttttcttttcctgtttttattttggtattaagtcgttgcctttatttgtaaagctgttataaatatatattatataaatatattaaaaaggaaaatgtttcagatgtttatttgtataattacttgattcacacagtgagaaaaaatgaatgtattcctgtttttgaagagaagaataatttttttttctctagggagaggtacagtgtttatattttggagccttcctgaaggtgtaaaattgtaaatatttttatctatgagtaaatgttaagtagttgttttaaaatacttaataaaataattcttttcctgtggaag

SEQ ID NO: 373 - protein, 207 aa, Homo Sapiens
MAKTYDYLFKLLLIGDSGVGKTCLLFRFSEDAFNTTFISTIGIDFKIRTIELDGKKIKLQIWDTAGQERFRTITTAYYRGAMGIMLVYDITNEKSFDNIKNWIRNIEEHASSDVERMILGNKCDMNDKRQVSKERGEKLAIDYGIKFLETSAKSSANVEEAFFTLARDIMTKLNRKMNDSNSAGAGGPVKITENRSKKTSFFRCSLL

SEQ ID NO: 374 - DNA, 1265 bp, Homo Sapiens
attggcgggcacgccccctcgcccgcggccccctccccgcctctctccaccgcctcctctggctccccggtcagagggccggagcgagaagatggcgaagacgtacgattatctcttcaagctcctgctgatcggcgactcgggggtaggcaagacctgcctcctgttccgcttctcagaggacgccttcaacaccaccttcatctccaccatcggaattgattttaaaattagaacgatagaactagatggaaagaaaattaagcttcagatatgggacacagcgggtcaggaaagattccgaacaatcacgacagcgtactacagaggagccatgggcattatgctggtctatgacatcacaaatgaaaaatcctttgacaatattaaaaattggatcagaaacattgaagagcatgcctcttccgatgtcgaaagaatgatcctgggtaacaaatgtgatatgaatgacaaaagacaagtgtcaaaagaaagaggggagaagctagcaattgactatgggattaaattcttggagacaagcgcaaaatccagtgcaaatgtagaagaggcattttttacacttgcacgagatataatgacaaaactcaacagaaaaatgaatgacagcaattcagcaggagcaggtggaccagtgaaaataacagaaaaccgatcaaagaagaccagtttctttcgttgctcgctactttgatgaactctttctgagagactgcagcacacctagagggccctttcctgcttctctgaaagcacaggtcacccagcctcagaatcacacctcccggctgctgctgagagcaccactgaacttagacctctcaacacagtatgccaagtggattccagcctcatggcctagcaaaagaacagactccctttttcaaacatggaagcaatgaagtggagacacatgcaggacctaactcgttttttccttgttttattacctgttgcagaagcggttatctttcttttttactttgcacatcagtgttagcctttccctatttcagcacaatcttagactcatatttgcacacttttgtgtcgtgaagttctagacaaatttgtacatgtggcaatgttaaaagagcatttacagcagaggttaatatactaaaattaaagggtatttggtctggttcatatggtcaaatattactgccttggtagcatttatttaagggctttttcttaaataagaatcattaaagtcattaaaaaatttactgaaatgccca

SEQ ID NO: 375 - protein, 196 aa, Homo Sapiens
MPGMFFSANPKELKGTTHSLLDDKMQKRRPKTFGMDMKAYLRSMIPHLESGMKSSKSKDVLSAAEVMQWSQSLEKLLANQTGQNVFGSFLKSEFSEENIEFWLACEDYKKTESDLLPCKAEEIYKAFVHSDAAKQINIDFRTRESTAKKIKAPTPTCFDEAQKVIYTLMEKDSYPRFLKSHIYLNLLNDLQANSLK

SEQ ID NO: 376 - DNA, 1227 bp, Homo Sapiens
gggagttagacaaaatgccaggaatgttcttctctgctaacccaaaggaattgaaaggaaccactcattcacttctagacgacaaaatgcaaaaaaggaggccaaagacttttggaatggatatgaaagcatacctgagatctatgatcccacatctggaatctggaatgaaatcttccaagtccaaggatgtactttctgctgctgaagtaatgcaatggtctcaatctctggaaaaacttcttgccaaccaaactggtcaaaatgtctttggaagtttcctaaagtctgaattcagtgaggagaatattgagttctggctggcttgtgaagactataagaaaacagagtctgatcttttgccctgtaaagcagaagagatatataaagcatttgtgcattcagatgctgctaaacaaatcaatattgacttccgcactcgagaatctacagccaagaagattaaagcaccaacccccacgtgttttgatgaagcacaaaaagtcatatatactcttatggaaaaggactcttatcccaggttcctcaaatcacatatttacttaaatcttctaaatgacctgcaggctaatagcctaaagtgactggtccctggctgaagggaattaacagatagtatcagcgcagaaggaatgtgccagtatggatccctgggtgaacagcttggccttttttgggtgtcttgacaggccaagaagaacaaatgactcagaaccggattaacatgaaagttatccaggcgcagagttgaagaagcataagcaagcaagacaaaaacagagagaccgcaaggaggaagatctgtggtactgtcataaaaaacagtggagctctgtattagaaaagcccctcagaactgggaaggccaggtaactctagttacacagaaactggtactaaagtctatcaaactgattacacagactgtaagaattcaaagtcaactgacatctatgctacatatattatatagtttgtacttgactatgagccattaacttaaagcatatgtttcaaatagccattgctactattccttgtccggtgtaattttattttattgtttttactttggaagagatgaactgtgtatttaacttaagctattgctcttaaaaccagggagtcagatatatttgtaaggttaaatcattggtgcaataataaatgtggattttgtattaaaatatatatgaagcaaaaaaa

SEQ ID NO: 377 - protein, 685 aa, Homo Sapiens
MQIFVKTLTGKTITLEVEPSDTIENVKAKIQDKEGIPPDQQRLIFAGKQLEDGRTLSDYNIQKESTLHLVLRLRGGMQIFVKTLTGKTITLEVEPSDTIENVKAKIQDKEGIPPDQQRLIFAGKQLEDGRTLSDYNIQKESTLHLVLRLRGGMQIFVKTLTGKTITLEVEPSDTIENVKAKIQDKEGIPPDQQRLIFAGKQLEDGRTLSDYNIQKESTLHLVLRLRGGMQIFVKTLTGKTITLEVEPSDTIENVKAKIQDKEGIPPDQQRLIFAGKQLEDGRTLSDYNIQKESTLHLVLRLRGGMQIFVKTLTGKTITLEVEPSDTIENVKAKIQDKEGIPPDQQRLIFAGKQLEDGRTLSDYNIQKESTLHLVLRLRGGMQIFVKTLTGKTITLEVEPSDTIENVKAKIQDKEGIPPDQQRLIFAGKQLEDGRTLSDYNIQKESTLHLVLRLRGGMQIFVKTLTGKTITLEVEPSDTIENVKAKIQDKEGIPPDQQRLIFAGKQLEDGRTLSDYNIQKESTLHLVLRLRGGMQIFVKTLTGKTITLEVEPSDTIENVKAKIQDKEGIPPDQQRLIFAGKQLEDGRTLSDYNIQKESTLHLVLRLRGGMQIFVKTLTGKTITLEVEPSDTIENVKAKIQDKEGIPPDQQRLIFAGKQLEDGRTLSDYNIQKESTLHLVLRLRGGV

SEQ ID NO: 378 - DNA, 2192 bp, Homo Sapiens
tagttccgtcgcagccgggatttgggtcgcggttcttgtttgtggatcgctgtgatcgtcacttgacaatgcagatcttcgtgaagactctgactggtaagaccatcaccctcgaggttgagcccagtgacaccatcgagaatgtcaaggcaaagatccaagataaggaaggcatccctcctgaccagcagaggctgatctttgctggaaaacagctggaagatgggcgcaccctgtctgactacaacatccagaaagagtccaccctgcacctggtgctccgtctcagaggtgggatgcaaatcttcgtgaagacactcactggcaagaccatcacccttgaggtggagcccagtgacaccatcgagaacgtcaaagcaaagatccaggacaaggaaggcattcctcctgaccagcagaggttgatctttgccggaaagcagctggaagatgggcgcaccctgtctgactacaacatccagaaagagtctaccctgcacctggtgctccgtctcagaggtgggatgcagatcttcgtgaagaccctgactggtaagaccatcaccctcgaggtggagcccagtgacaccatcgagaatgtcaaggcaaagatccaagataaggaaggcattcctcctgatcagcagaggttgatctttgccggaaaacagctggaagatggtcgtaccctgtctgactacaacatccagaaagagtccaccttgcacctggtactccgtctcagaggtgggatgcaaatcttcgtgaagacactcactggcaagaccatcacccttgaggtcgagcccagtgacactatcgagaacgtcaaagcaaagatccaagacaaggaaggcattcctcctgaccagcagaggttgatctttgccggaaagcagctggaagatgggcgcaccctgtctgactacaacatccagaaagagtctaccctgcacctggtgctccgtctcagaggtgggatgcagatcttcgtgaagaccctgactggtaagaccatcaccctcgaagtggagccgagtgacaccattgagaatgtcaaggcaaagatccaagacaaggaaggcatccctcctgaccagcagaggttgatctttgccggaaaacagctggaagatggtcgtaccctgtctgactacaacatccagaaagagtccaccttgcacctggtgctccgtctcagaggtgggatgcagatcttcgtgaagaccctgactggtaagaccatcactctcgaggtggagccgagtgacaccattgagaatgtcaaggcaaagatccaagacaaggaaggcatccctcctgatcagcagaggttgatctttgctgggaaacagctggaagatggacgcaccctgtctgactacaacatccagaaagagtccaccctgcacctggtgctccgtcttagaggtgggatgcagatcttcgtgaagaccctgactggtaagaccatcactctcgaagtggagccgagtgacaccattgagaatgtcaaggcaaagatccaagacaaggaaggcatccctcctgaccagcagaggttgatctttgctgggaaacagctggaagatggacgcaccctgtctgactacaacatccagaaagagtccaccctgcacctggtgctccgtcttagaggtgggatgcagatcttcgtgaagaccctgactggtaagaccatcactctcgaagtggagccgagtgacaccattgagaatgtcaaggcaaagatccaagacaaggaaggcatccctcctgaccagcagaggttgatctttgctgggaaacagctggaagatggacgcaccctgtctgactacaacatccagaaagagtccaccctgcacctggtgctccgtctcagaggtgggatgcagatcttcgtgaagaccctgactggtaagaccatcaccctcgaggtggagcccagtgacaccatcgagaatgtcaaggcaaagatccaagataaggaaggcatccctcctgatcagcagaggttgatctttgctgggaaacagctggaagatggacgcaccctgtctgactacaacatccagaaagagtccactctgcacttggtcctgcgcttgagggggggtgtctaagtttccccttttaaggtttcaacaaatttcattgcactttcctttcaataaagttgttgcattccc

SEQ ID NO: 379 - protein, 1049 aa, Homo Sapiens
MGSRTPESPLHAVQLRWGPRRRPPLVPLLLLLVPPPPRVGGFNLDAEAPAVLSGPPGSFFGFSVEFYRPGTDGVSVLVGAPKANTSQPGVLQGGAVYLCPWGASPTQCTPIEFDSKGSRLLESSLSSSEGEEPVEYKSLQWFGATVRAHGSSILACAPLYSWRTEKEPLSDPVGTCYLSTDNFTRILEYAPCRSDFSWAAGQGYCQGGFSAEFTKTGRVVLGGPGSYFWQGQILSATQEQIAESYYPEYLINLVQGQLQTRQASSIYDDSYLGYSVAVGEFSGDDTEDFVAGVPKGNLTYGYVTILNGSDIRSLYNFSGEQMASYFGYAVAATDVNGDGLDDLLVGAPLLMDRTPDGRPQEVGRVYVYLQHPAGIEPTPTLTLTGHDEFGRFGSSLTPLGDLDQDGYNDVAIGAPFGGETQQGVVFVFPGGPGGLGSKPSQVLQPLWAASHTPDFFGSALRGGRDLDGNGYPDLIVGSFGVDKAVVYRGRPIVSASASLTIFPAMFNPEERSCSLEGNPVACINLSFCLNASGKHVADSIGFTVELQLDWQKQKGGVRRALFLASRQATLTQTLLIQNGAREDCREMKIYLRNESEFRDKLSPIHIALNFSLDPQAPVDSHGLRPALHYQSKSRIEDKAQILLDCGEDNICVPDLQLEVFGEQNHVYLGDKNALNLTFHAQNVGEGGAYEAELRVTAPPEAEYSGLVRHPGNFSSLSCDYFAVNQSRLLVCDLGNPMKAGASLWGGLRFTVPHLRDTKKTIQFDFQILSKNLNNSQSDVVSFRLSVEAQAQVTLNGVSKPEAVLFPVSDWHPRDQPQKEEDLGPAVHHVYELINQGPSSISQGVLELSCPQALEGQQLLYVTRVTGLNCTTNHPINPKGLELDPEGSLHHQQKREAPSRSSASSGPQILKCPEAECFRLRCELGPLHQQESQSLQLHFRVWAKTFLQREHQPFSLQCEAVYKALKMPYRILPRQLPQKERQVATAVQWTKAEGSYGVPLWIIILAILFGLLLLGLLIYILYKLGFFKRSLPYGTAMEKAQLKPPATSDA

SEQ ID NO: 380 - DNA, 4204 bp, Homo Sapiens
caggacagggaagagcgggcgctatggggagccggacgccagagtcccctctccacgccgtgcagctgcgctggggcccccggcgccgacccccgctcgtgccgctgctgttgctgctcgtgccgccgccacccagggtcgggggcttcaacttagacgcggaggccccagcagtactctcggggcccccgggctccttcttcggattctcagtggagttttaccggccgggaacagacggggtcagtgtgctggtgggagcacccaaggctaataccagccagccaggagtgctgcagggtggtgctgtctacctctgtccttggggtgccagccccacacagtgcacccccattgaatttgacagcaaaggctctcggctcctggagtcctcactgtccagctcagagggagaggagcctgtggagtacaagtccttgcagtggttcggggcaacagttcgagcccatggctcctccatcttggcatgcgctccactgtacagctggcgcacagagaaggagccactgagcgaccccgtgggcacctgctacctctccacagataacttcacccgaattctggagtatgcaccctgccgctcagatttcagctgggcagcaggacagggttactgccaaggaggcttcagtgccgagttcaccaagactggccgtgtggttttaggtggaccaggaagctatttctggcaaggccagatcctgtctgccactcaggagcagattgcagaatcttattaccccgagtacctgatcaacctggttcaggggcagctgcagactcgccaggccagttccatctatgatgacagctacctaggatactctgtggctgttggtgaattcagtggtgatgacacagaagactttgttgctggtgtgcccaaagggaacctcacttacggctatgtcaccatccttaatggctcagacattcgatccctctacaacttctcaggggaacagatggcctcctactttggctatgcagtggccgccacagacgtcaatggggacgggctggatgacttgctggtgggggcacccctgctcatggatcggacccctgacgggcggcctcaggaggtgggcagggtctacgtctacctgcagcacccagccggcatagagcccacgcccacccttaccctcactggccatgatgagtttggccgatttggcagctccttgacccccctgggggacctggaccaggatggctacaatgatgtggccatcggggctccctttggtggggagacccagcagggagtagtgtttgtatttcctgggggcccaggagggctgggctctaagccttcccaggttctgcagcccctgtgggcagccagccacaccccagacttctttggctctgcccttcgaggaggccgagacctggatggcaatggatatcctgatctgattgtggggtcctttggtgtggacaaggctgtggtatacaggggccgccccatcgtgtccgctagtgcctccctcaccatcttccccgccatgttcaacccagaggagcggagctgcagcttagaggggaaccctgtggcctgcatcaaccttagcttctgcctcaatgcttctggaaaacacgttgctgactccattggtttcacagtggaacttcagctggactggcagaagcagaagggaggggtacggcgggcactgttcctggcctccaggcaggcaaccctgacccagaccctgctcatccagaatggggctcgagaggattgcagagagatgaagatctacctcaggaacgagtcagaatttcgagacaaactctcgccgattcacatcgctctcaacttctccttggacccccaagccccagtggacagccacggcctcaggccagccctacattatcagagcaagagccggatagaggacaaggctcagatcttgctggactgtggagaagacaacatctgtgtgcctgacctgcagctggaagtgtttggggagcagaaccatgtgtacctgggtgacaagaatgccctgaacctcactttccatgcccagaatgtgggtgagggtggcgcctatgaggctgagcttcgggtcaccgcccctccagaggctgagtactcaggactcgtcagacacccagggaacttctccagcctgagctgtgactactttgccgtgaaccagagccgcctgctggtgtgtgacctgggcaaccccatgaaggcaggagccagtctgtggggtggccttcggtttacagtccctcatctccgggacactaagaaaaccatccagtttgacttccagatcctcagcaagaatctcaacaactcgcaaagcgacgtggtttcctttcggctctccgtggaggctcaggcccaggtcaccctgaacggtgtctccaagcctgaggcagtgctattcccagtaagcgactggcatccccgagaccagcctcagaaggaggaggacctgggacctgctgtccaccatgtctatgagctcatcaaccaaggccccagctccattagccagggtgtgctggaactcagctgtccccaggctctggaaggtcagcagctcctatatgtgaccagagttacgggactcaactgcaccaccaatcaccccattaacccaaagggcctggagttggatcccgagggttccctgcaccaccagcaaaaacgggaagctccaagccgcagctctgcttcctcgggacctcagatcctgaaatgcccggaggctgagtgtttcaggctgcgctgtgagctcgggcccctgcaccaacaagagagccaaagtctgcagttgcatttccgagtctgggccaagactttcttgcagcgggagcaccagccatttagcctgcagtgtgaggctgtgtacaaagccctgaagatgccctaccgaatcctgcctcggcagctgccccaaaaagagcgtcaggtggccacagctgtgcaatggaccaaggcagaaggcagctatggcgtcccactgtggatcatcatcctagccatcctgtttggcctcctgctcctaggtctactcatctacatcctctacaagcttggattcttcaaacgctccctcccatatggcaccgccatggaaaaagctcagctcaagcctccagccacctctgatgcctgagtcctcccaatttcagactcccattcctgaagaaccagtccccccaccctcattctactgaaaaggaggggtctgggtacttcttgaaggtgctgacggccagggagaagctcctctccccagcccagagacatacttgaagggccagagccaggggggtgaggagctggggatccctcccccccatgcactgtgaaggacccttgtttacacataccctcttcatggatgggggaactcagatccagggacagaggcccagcctccctgaagcctttgcattttggagagtttcctgaaacaactggaaagataactaggaaatccattcacagttctttgggccagacatgccacaaggacttcctgtccagctccaacctgcaaagatctgtcctcagccttgccagagatccaaaagaagcccccagtaagaacctggaacttggggagttaagacctggcagctctggacagccccaccctggtgggccaacaaagaacactaactatgcatggtgccccaggaccagctcaggacagatgccacaaggatagatgctggcccagggccagagcccagctccaaggggaatcagaactcaaatggggccagatccagcctggggtctggagttgatctggaacccagactcagacattggcaccaatccaggcagatccaggactatatttgggcctgctccagacctgatcctggaggcccagttcaccctgatttaggagaagccaggaatttcccaggacctgaaggggccatgatggcaacagatctggaacctcagcctggccagacacaggccctccctgttccccagagaaaggggagcccactgtcctgggcctgcagaatttgggttctgcctgccagctgcactgatgctgcccctcatctctctgcccaacccttccctcaccttggcaccagacacccaggacttatttaaactctgttgcaagtgcaataaatctgacccagtgcccccactgaccagaactagaaaaaaaaa

SEQ ID NO: 381 - protein, 500 aa, Homo Sapiens
MDHTEGLPAEEPPAHAPSPGKFGERPPPKRLTREAMRNYLKERGDQTVLILHAKVAQKSYGNEKRFFCPPPCVYLMGSGWKKKKEQMERDGCSEQESQPCAFIGIGNSDQEMQQLNLEGKNYCTAKTLYISDSDKRKHFIFSVKMFYGNSDDIGVFLSKRIKVISKPSKKKQSLKNADLCIASGTKVALFNRLRSQTVSTRYLHVEGGNFHASSQQWGAFFIHLLDDDESEGEEFTVRDVYIHYGQTCKLVCSVTGMALPRLIIMKVDKHTALLDADDPVSQLHKCAFYLKDTERMYLCLSQERIIQFQATPCPKEPNKEMINDGASWTIISTDKAEYTFYEGMGPVLAPVTPVPVVESLQLNGGGDVAMLELTGQNFTPNLRVWFGDVEAETMYRCGESMLCVVPDISAFREGWRWVRQPVQVPVTLVRNDGIIYSTSLTFTYTPEPGPRPHCSVAGAILPANSSQVPPNESNTNSEGSYTNASTNSTSVTSSTATVVS

SEQ ID NO: 382 - DNA, 1580 bp, Homo Sapiens
atcccctccggttttcctcagtctccacgtacgtccctcaaagcgcgtcctaaaacccggataaccggagcgctccccatggaccacacggagggcttgcccgcggaggagccgcctgcgcatgctccatcgcctgggaaatttggtgagcggcctccacctaaacgacttactagggaagctatgcgaaattatttaaaagagcgaggggatcaaacagtacttattcttcatgcaaaagttgcacagaagtcatatggaaatgaaaaaaggtttttttgcccacctccttgtgtatatcttatgggcagcggatggaagaaaaaaaaagaacaaatggaacgcgatggttgttctgaacaagagtctcaaccgtgtgcatttattgggataggaaatagtgaccaagaaatgcagcagctaaacttggaaggaaagaactattgcacagccaaaacattgtatatatctgactcagacaagcgaaagcacttcattttttctgtaaagatgttctatggcaacagtgatgacattggtgtgttcctcagcaagcggataaaagtcatctccaaaccttccaaaaagaagcagtcattgaaaaatgctgacttatgcattgcctcaggaacaaaggtggctctgtttaatcgactacgatcccagacagttagtaccagatacttgcatgtagaaggaggtaattttcatgccagttcacagcagtggggagccttttttattcatctcttggatgatgatgaatcagaaggagaagaattcacagtccgagatgtctacatccattatggacaaacatgcaaacttgtgtgctcagttactggcatggcactcccaagattgataattatgaaagttgataagcataccgcattattggatgcagatgatcctgtgtcacaactccataaatgtgcattttaccttaaggatacagaaagaatgtatttgtgcctttctcaagaaagaataattcaatttcaggccactccatgtccaaaagaaccaaataaagagatgataaatgatggcgcttcctggacaatcattagcacagataaggcagagtatacattttatgagggaatgggccctgtccttgccccagtcactcctgtgcctgtggtagagagccttcagttgaatggcggtggggacgtagcaatgcttgaacttacaggacagaatttcactccaaatttacgagtgtggtttggggatgtagaagctgaaactatgtacaggtgtggagagagtatgctctgtgtcgtcccagacatttctgcattccgagaaggttggagatgggtccggcaaccagtccaggttccagtaactttggtccgaaatgatggaatcatttattccaccagccttacctttacctacacaccagaaccagggccacggccacattgcagtgtagcaggagcaatccttccagccaattcaagccaggtgccccctaacgaatcaaacacaaacagcgagggaagttacacaaacgccagcacaaattcaaccagtgtcacatcatctacagccacagtggtatccta

SEQ ID NO: 383 - protein, 621 aa, Homo Sapiens [sequence omitted]

SEQ ID NO: 384 - DNA, 2090 bp, Homo Sapiens
aatggaggagtcggaacccgaacggaagcgggctcgcaccgacgaggtgctgccggaggaagccgctccgaggcggaagatgaggacgacgaggactacgtgccctatgtgccgttacgcagcgccgcagctactgctccagaagctgctgcagcgaagacgcaagggagctgcggaggaagagcagcaggacagcggtagtgaaccccggggagatgaggacgacatcccgctaggccctcagtccaacgtcagcctcctggatcagcaccagcaccttaaagagaaggctgaagcgcgcaaagagtctgccaaggagaagcagctgaaggaagaagagaagatcctggagagtgttgccgagggccgagcattgatgtcagtgaaggagatggctaagggcattacgtatgatgaccccatcaaaaccagctggactccaccccgttatgttctgagcatgtctgaagagcgacatgagcgcgtgcggaagaaataccacatcctggtggagggagacggtatcccaccacccatcaagagcttcaaggaaatgaagtttcctgcagccatcctgagaggcctgaagaagaaaggcattcaccacccaacacccattcagatccagggcatccccaccattctatctggccgtgacatgataggcatcgctttcacgggttcaggcaagacactggtgttcacgttgcccgtcatcatgttctgcctggaacaagagaagaggttacccttctcaaagcgcgaggggccctatggactcatcatctgcccctcgcgggagctggcccggcagacccatggcatcctggagtactactgccgcctgctgcaggaggacagctcaccactcctgcgctgcgccctctgcattgggggcatgtccgtgaaagagcagatggagaccatccgacacggtgtacacatgatggtggccaccccggggcgcctcatggatttgctgcagaagaagatggtcagcctagacatctgtcgctacctggccctggacgaggctgaccgcatgatcgacatgggcttcgagggtgacatccgtaccatcttctcctacttcaagggccagcgacagaccctgctcttcagtgccaccatgccgaagaagattcagaactttgctaagagtgcccttgtaaagcctgtgaccatcaatgtggggcgcgctggggctgccagcctggatgtcatccaggaggtagaatatgtgaaggaggaggccaagatggtgtacctgctcgagtgcctgcagaagacacccccgcctgtactcatctttgcagagaagaaggcagacgtggacgccatccacgagtacctgctgctcaagggggttgaggccgtagccatccatgggggcaaagaccaggaggaacggactaaggccatcgaggcattccgggagggcaagaaggatgtcctagtagccacagacgttgcctccaagggcctggacttccctgccatccagcacgtcatcaattatgacatgccagaggagattgagaactatgtacaccggattggccgcaccgggcgctcgggaaacacaggcatcgccactaccttcatcaacaaagcgtgtgatgagtcagtgctgatggacctcaaagcgctgctgctagaagccaagcagaaggtgccgcccgtgctgcaggtgctgcattgcggggatgagtccatgctggacattggaggagagcgcggctgtgccttctgcgggggcctgggtcatcggatcactgactgccccaaactcgaggctatgcagaccaagcaggtcagcaacatcggtcgcaaggactacctggcccacagctccatggacttctgagccgacagtcttcccttctctccaagaggcctcagtccccaagactgccaccagtctacacatacagcagccccctggacagaatcagcatttcagctcagctggcctggaatgggccaggctggtcctggctgcctgttccctgtgctcttcagaattactgtttttgtttccttttaccccagctgccattaaagcccaaacctctagcccaaaaaaaaaa

SEQ ID NO: 385 - protein, 209 aa, Homo Sapiens
MGKGDPNKPRGKMSSYAFFVQTCREEHKKKHPDSSVNFAEFSKKCSERWKTMSAKEKSKFEDMAKSDKARYDREMKNYVPPKGDKKGKKKDPNAPKRPPSAFFLFCSEHRPKIKSEHPGLSIGDTAKKLGEMWSEQSAKDKQPYEQKAAKLKEKYEKDIAAYRAKGKSEAGKKGPGRPTGSKKKNEPEDEEEEEEEEDEDEEEEDEDEE

SEQ ID NO: 386 - DNA, 1277 bp, Homo Sapiens
gatgtggcccgtggcctagctcgtcaagttgccgtggcgcggagaactctgcaaaacaagaggctgaggattgcgttagagataaaccagttcacgccggagccccgtgagggaagcgtctccgttgggtccggccgctctgcgggactctgaggaaaagctcgcaccaggtggacgcggatctgtcaacatgggtaaaggagaccccaacaagccgcggggcaaaatgtcctcgtacgccttcttcgtgcagacctgccgggaagagcacaagaagaaacacccggactcttccgtcaatttcgcggaattctccaagaagtgttcggagagatggaagaccatgtctgcaaaggagaagtcgaagtttgaagatatggcaaaaagtgacaaagctcgctatgacagggagatgaaaaattacgttcctcccaaaggtgataagaaggggaagaaaaaggaccccaatgctcctaaaaggccaccatctgccttcttcctgttttgctctgaacatcgcccaaagatcaaaagtgaacaccctggcctatccattggggatactgcaaagaaattgggtgaaatgtggtctgagcagtcagccaaagataaacaaccatatgaacagaaagcagctaagctaaaggagaaatatgaaaaggatattgctgcatatcgtgccaagggcaaaagtgaagcaggaaagaagggccctggcaggccaacaggctcaaagaagaagaacgaaccagaagatgaggaggaggaggaggaagaagaagatgaagatgaggaggaagaggatgaagatgaagaataaatggctatcctttaatgatgcgtgtggaatgtgtgtgtgtgctcaggcaattattttgctaagaatgtgaattcaagtgcagctcaatactagcttcagtataaaaactgtacagatttttgtatagctgataagattctctgtagagaaaatacttttaaaaaatgcaggttgtagctttttgatgggctactcatacagttagattttacagcttctgatgttgaatgttcctaaatatttaatggtttttttaatttctgtgtgtatggtagcacagcaaacttgtaggaattagtatcaatagtaaattttgggttttttaggatgttgcatttcgtttttttaaaaaaaattttgtaataaaattatgtatattatttctattgtctttgtcttaatatgctaagttaattttcactttaaaaaagccatttgaagaccaaaaaaaaaaaaa

SEQ ID NO: 387 - protein, 212 aa, Homo Sapiens
MRSRLLLSVAHLPTIRETTEEMLLGGPGQEPPPSPSLDDYVRSISRLAQPTSVLDKATAQGQPRPPHRPAQACRKGRPAVSLRDITARFSGQQPTLPMADTVDPLDWLFGESQEKQPSQRDLPRRTGPSAGLWGPHRQMDSSKPMGAPRGRLCEARMPGHSLARPPQDGQQSSDLRSWTFGQSAQAMASRHRPRPSSVLRTLYSHLPVIHEL

SEQ ID NO: 388 - DNA, 2114 bp, Homo Sapiens
cacactgctcagggaagagcctgctacggtggactgtgagactcagtgcactgtcctcctcccagcgaccccacgctggaccccctgccggaccctccacccttcggcccccaagcttcccaggggcttcctttggactggactgtccctgctcatccattctcctgccacccccagacctcctcagctccaggttgccacctcctctcgccagagtgatgaggtcccggcttctgctctccgtggcccatctgcccacaattcgggagaccacggaggagatgctgcttgggggtcctggacaggagcccccaccctctcctagcctggatgactacgtgaggtctatatctcgactggcacagcccacctctgtgctggacaaggccacggcccagggccaacccaggccaccccacaggccagcccaggcctgccggaagggccgccctgctgtgtccctgcgagacatcaccgcacgtttcagtggccagcagcccacactgcccatggctgatactgtggaccccctggactggctttttggggagtcccaggaaaagcagccaagccagagggacctgccaaggaggactggcccctctgctggcctctggggtccacatagacagatggacagcagcaagcccatgggggcccccagagggaggctctgtgaagccaggatgcctgggcattccctggcaagaccaccgcaggatgggcagcagagctctgacctaagaagctggacttttgggcagtctgcccaagccatggcctcccgccaccgcccccgccccagcagtgtcctcagaacactctactcgcacctcccggtgatccatgaactctgacccctccccagtaaaggcttctgtagagagcatgctgggtctgcatctcctctcgtctcctccatggtggtcactgcccctggcaggtctctgaaagggaaatgcttttctgcagaggccccttcttgggcagttcacagttagacccaccccctctgaatatgataacagcctgtttcacatgaggagatgttaccaatcccgttcgctctgacccttgctggctgatcaccttgagcaacttacttaacatctgtgttcctcagtttctcatgggtaatatagggataattactggcacctgcctcccaggccattctgacgtgtaccgcatataggagcccactggctgagtagctaccatcatcgctggtggggaaactggtggtaggggtgtgagggtagtgggggtgtcagcccccaggtgtttcagaacaaggcctcgggcactcccaagtctgcctcttggctcccaccctcaaagcccatgttctgtgaggcccaagagaacacatggagtcttagcaaatgcactaatgtattccgggggactgtcacctggcaccactggggcactctgctggctacaactcatacgtcctgtggtggcattgggagagttcccccatgatgagggccaagatagaatctgtaccactcagtgctaccatccccacccctacaccacttccacacaggggcctcatggcatggtcagggtcccagctgtgggtgagagcagggcactgtccagctgtccactggggaagtcaagatgtcctaaggcccaggccagggcatctggagtctgaaggaccctagttcctagaggcatctggcagcaagaaggtgaggcatcagggaacgggaatcaggctgggactgatcagaggtgaagggacagagagaggagaggaggaagattgagctggggcaacagccaagctcacctggcaggtctctgccacctccttctctgtgagctgtcagtctaggttattctctttttttgtggctatttttaattgctttggatttgttaaatgttttctgtcttctgttaagtgtgttttctctggagatagaatgtaaaccatattaaaaggaaaaagtttcagacaagcaattacccagtttccttatctataaaatggggacatcagcaatgttcttcacaccctgcaagggctgggaattgcgcatgtgaacttggagctgcatttatgagcactgtagacaaatgtttgtatctgtcac

SEQ ID NO: 389 - protein, 193 aa, Homo Sapiens
MQSLMQAPLLIALGLLLATPAQAHLKKPSQLSSFSWDNCDEGKDPAVIRSLTLEPDPIVVPGNVTLSVVGSTSVPLSSPLKVDLVLEKEVAGLWIKIPCTDYIGSCTFEHFCDVLDMLIPTGEPCPEPLRTYGLPCHCPFKEGTYSLPKSEFVVPDLELPSWLTTGNYRIESVLSSSGKRLGCIKIAASLKGI

SEQ ID NO: 390 - DNA, 2478 bp, Homo Sapiens
ctcagcttctttgcgtaaccaatactggaaggcatttaaaggacctctgccgcctcagaccttgcagttaactccgccctgacccacccttcccgatgcagtccctgatgcaggctcccctcctgatcgccctgggcttgcttctcgcgacccctgcgcaagcccacctgaaaaagccatcccagctcagtagcttttcctgggataactgtgatgaagggaaggaccctgcggtgatcagaagcctgactctggagcctgaccccatcgtcgttcctggaaatgtgaccctcagtgtcgtgggcagcaccagtgtccccctgagttctcctctgaaggtggatttagttttggagaaggaggtggctggcctctggatcaagatcccatgcacagactacattggcagctgtacctttgaacacttctgtgatgtgcttgacatgttaattcctactggggagccctgcccagagcccctgcgtacctatgggcttccttgccactgtcccttcaaagaaggaacctactcactgcccaagagcgaattcgttgtgcctgacctggagctgcccagttggctcaccaccgggaactaccgcatagagagcgtcctgagcagcagtgggaagcgtctgggctgcatcaagatcgctgcctctctaaagggcatatagcatggcatctgccacagcagaatggagcggtgtgaggaaggtcccttttcctctgttttgtgtttgccaaggccaaactcccactctctgcccccctttaatcccctttctacagtgagtccactaccctcactgaaaatcattttgtaccacttacattttaggctggggcaagcagccctgacctaagggagaatgagttggacagttcttgatagcccagggcatctgctgggctgaccacgttactcatccccgttaacattctctctaaagagcctcgttcatttccaaagcagttaaggaatgggaacagagtgttttaggacctgaagaatctttatgactctctctctttctctctttttttttttgtcactaagttaaaagcgaagtgagagtattaacgtttttgttctcctccggccccctgttacaatgaaggggcaaaagtatttgctcttagtctattcctcccttaacttctgtgactaatttttatttcctttctagatttgcccaattaatactagggtgcagtgtatcctggagaggtagggtgtgtgggggaggaatcccttgggggagatattaggagtgctctgttgtttacaaactcaggtacccgcagggcctagcaagagacttaaatgactgataagaaccgtgagaaacatgttgcttccaggcttgatttcgatttttcgctttttttttttgggacggagtctcgctttgtcaccaggctggagtgcagtggtgcaatctcacctcactgcaacctccgcctcctgggttcaagcaattctcctgcctcagcctcccaagtagcttggactacaggccctgccaccacgcccggctaatttgtgtatttttagtagagatggggtttcaccatgttggccaggatggtctcgatctcttgacctcgtgatccgtccaccttggccttgcaaagcgctggattacaggcatgagccactacacccagccgatttttcctttttgattaaagatgctattacaatgtaaatatttcttacacagaaagtcacagcacatgtgcccattgatacaaggctgctgaggcctggtctccagttggaaatataattaagggtggcagggactggagtcagttggagagtgcatagccagtctgtgaagacaactgccagatactggcaatactccagcctggtgacagagtgagactctgtctcaaaaaaaaagtttcaatgtttactcctagagaagccaaaaatccagatttgtatatgaaatcttaccattttaaaagattggcagctaattatttttttaaaaagctgtgcagtgtgatgtgtcccaaacggactggctcatgggtggccacgtcacaacctctgatctcagaccgtgcatgccttgtcctcttaagacaactcctgtggcaccgtttctccctccacagggccaaagccatagtgtccggtcccaaggacaaggctcttccagtgctaggagaggtatgagcagcctctcacctgtgagctgtggggatcacaaggctgcctgcctcagtcttggagtcctgttgggtgaatgaggcagatgggaaagagcctcaccagcagctgcttttggagcaggggtccaaggaagagagggtggcctcgacatcaaactgcctggatttttctaccaccctgttacatcataacaacttctgaaacacacaccagccctgagttctgggctcatttgaagcctggaatagcaataaatctttttaacttgcaaaaaaaaaaaaaaaaaa

SEQ ID NO: 391 - protein, 292 aa, Homo Sapiens
MPAALVENSQVICEVWASNLEEEMRKIREIVPSYSYIAMDTEFPGVVVRPIGEFRSSIDYQYQLLRCNVDLLKIIQLGLTFTNEKGEYPSGINTWQFNFKFNLTEDMYSQDSIDLLANSGLQFQKHEEEGIDTLHFAELLMTSGVVLCDNVKWLSFHSGYDFGYMVKLLTDSRLPEEEHEFLHILNLFSPSIYDVKYLMKSCKNLKGGLQEVADQLDLQRIGRQHQAGSDSLLTGMAFFRMKELFFEDSIDDAKYCGRLYGLGTGVAQKQNEDVDSAQEKMSILAIINNMQQ

SEQ ID NO: 392 - DNA, 2489 bp, Homo Sapiens
gcacgagggggtagagggaaaagagctccgggccaggggctgccgtcgccgccgtcggggagtcagcccgccagcccgccagctcgtcagcccgccaccagcttcgcgggccctgtcggtcccggtaagcgggcctgcgcttaccggaaagaggagcgtaagatgaaagagtatcagaccaaacattgtctggcttgcactgtaaaactagttagctgaagacgacttctcaggtttcttcaggatgcctgcagcacttgtggagaatagccaggttatctgtgaagtgtgggccagtaatctagaagaagagatgaggaagatccgagaaatcgtgcccagttacagttatattgccatggacacagaatttccaggtgttgtggtgcgaccaattggtgaatttcgtagttccatagattaccaatatcagcttctgcggtgcaatgttgaccttttaaaaattatccagctgggccttacattcacaaatgagaagggagagtatccttctggaatcaatacttggcagttcaatttcaaatttaaccttacagaggacatgtactcccaggattccatagatctccttgctaactcaggactacagtttcagaagcatgaagaggaagggattgacacactgcactttgcagagctgcttatgacatcaggagtggttctctgtgacaatgtcaaatggctttcatttcatagtggctatgattttggctatatggtaaagttgcttacagattctcgtttgccagaagaggaacatgaattcttacatattctgaaccttttctccccatccatttatgatgtgaaatacctgatgaagagctgcaaaaatcttaagggaggtcttcaggaagttgctgatcagttggatttgcagaggattggaaggcagcaccaggcaggctcagactcactgctgacaggaatggctttctttaggatgaaagagttgttttttgaggacagcattgatgatgccaagtactgtgggcggctctatggcttaggcacaggagtggcccagaagcagaatgaggatgtggactctgcccaggagaagatgagcatcctggcgattatcaacaacatgcagcagtgatggcgccaggctctgcagggtgggcctgatcccagagtggtgcttactgtgctgactgtgtacttatcttccccaagagaaaatgcttcttttgagcacactgtacctaccatctgcattgagcagaaagacttttgttttactgaagacaaaagatgtttttattttagacccagaagagaggagtttgctctgaatttgtaaataagtcttccccattcctcatactcgagcctctcctctctggttgcctcctgccaccagcatccatggctcatttgacacctttttaaatatcaggacaagtctgaaacaaagtagtaaaatgtatataactcttacctgttgtcattctttttcttttaaatttgttgctaatctctgataatgaagattcttactctgattctcagctgagctgtgagggcttccagggaaaatggaacaaaatggtgttcttaggtaatgggttgtagatactgagtcttcctttccttttctgacccttctcgaggacatttgctttcctcacacttttgtagtctctctttacatattactatatggaaatgaattgctctgtgctgaaatttgaagaccagataatgaaactgaaaagcaaacaatttttactgaatctgtctaccttcattcatgagaactccagaatgagtgttgaccactgaagcatcttttaagtctgtgttccattgtgccattcaggtttgctgtcacatatgcatcatctgaaatcatttgaaatttttgtacaataaaatatcctggatttgatcctgaaggaaactagtaagatcagatttttgggtcatgtctgttgtattttcagtaatgtgatttcagatggtcatctggattctcccacttctctactccattatttctctacttttccttccagcaaaccttgaaacgtgagggagatggattaatgtgagtaacaggaatgtgtctttaaaaagctagagtggttacatttaatcaggcagtaagataatttgggttcttgagttgttttggagtaatatcccacaactggggtaggaagctcaggacttttttctttaaagctagtcatttcaaaagcatattgtatttttttgaatgactacagtatggacaatttcaaaaaccaaaacccactttggattggtggaagtaaaaactggtaactcactcaagtgaatgaatggtcttgcattttaaaagcttatgggaaactcaatttgaaatgattagaaaatgtcaagtattataagctggtatttaagatgcttgtaaatactatttatgtttttaattttgtaaaataaagatttctttttaaaaaaaaaaaaaaaaaaaaaaa

SEQ ID NO: 393 - skipped

SEQ ID NO: 394 - DNA, 529 bp, Homo Sapiens
tcatctttctctttattctgacaacattatgacattaaataaaatccaagaggtattggattagtccttgtttggtctctggtgatttagataaggcagaactgagcccctcggaatgtattatctcaaagagctagtagcagctgctatgcaaagttctaaggcccgagtcaaatcctgggcatctccacagatgtgtggtagggcacgggctccagctcttgtgtaagaaagaacaggaatgagaacagctttattttgtagcgccaaggtctcactatgctcacacctgtaatcccagctttgagaagaggatctggcaccagaagggtctggtagaagaaagtgggaaaggtgaaggacagggatcctttcccttctgctacaacctagggacagaggcacttgacttccgcaagggggccaaagaaggtagcagctacttggggttttgtgtgggagatggccgaccactccaagggaggtcaaatggcttttttcaggacgtggaatctcgtccaaaaaatgg

SEQ ID NO: 395 - protein, 99 aa, Homo Sapiens
MKVSAALLCLLLIAATFIPQGLAQPDAINAPVTCCYNFTNRKISVQRLASYRRITSSKCPKEAVIFKTIVAKEICADPKQKWVQDSMDHLDKQTQTPKT

SEQ ID NO: 396 - DNA, 739 bp, Homo Sapiens
ctaacccagaaacatccaattctcaaactgaagctcgcactctcgcctccagcatgaaagtctctgccgcccttctgtgcctgctgctcatagcagccaccttcattccccaagggctcgctcagccagatgcaatcaatgccccagtcacctgctgttataacttcaccaataggaagatctcagtgcagaggctcgcgagctatagaagaatcaccagcagcaagtgtcccaaagaagctgtgatcttcaagaccattgtggccaaggagatctgtgctgaccccaagcagaagtgggttcaggattccatggaccacctggacaagcaaacccaaactccgaagacttgaacactcactccacaacccaagaatctgcagctaacttattttcccctagctttccccagacaccctgttttattttattataatgaattttgtttgttgatgtgaaacattatgccttaagtaatgttaattcttatttaagttattgatgttttaagtttatctttcatggtactagtgttttttagatacagagacttggggaaattgcttttcctcttgaaccacagttctacccctgggatgttttgagggtctttgcaagaatcattaatacaaagaattttttttaacattccaatgcattgctaaaatattattgtggaaatgaatattttgtaactattacaccaaataaatatatttttgtacaaaaaaaaaaaaaa

SEQ ID NO: 397 - protein, 212 aa, Homo Sapiens
MDYLLMIFSLLFVACQGAPETAVLGAELSAVGENGGEKPTPSPPWRLRRSKRCSCSSLMDKECVYFCHLDIIWVNTPEHVVPYGLGSPRSKRALENLLPTKATDRENRCQCASQKDKKCWNFCQAGKELRAEDIMEKDWNNHKKGKDCSKLGKKCIYQQLVRGRKIRRSSEEHLRQTRSETMRNSVKSSFHDPKLKGKPSRERYVTHNRAHW

SEQ ID NO: 398 - DNA, 1251 bp, Homo Sapiens
ggagctgtttacccccactctaataggggttcaatataaaaagccggcagagagctgtccaagtcagacgcgcctctgcatctgcgccaggcgaacgggtcctgcgcctcctgcagtcccagctctccaccaccgccgcgtgcgcctgcagacgctccgctcgctgccttctctcctggcaggcgctgccttttctccccgttaaagggcacttgggctgaaggatcgctttgagatctgaggaacccgcagcgctttgagggacctgaagctgtttttcttcgttttcctttgggttcagtttgaacgggaggtttttgatccctttttttcagaatggattatttgctcatgattttctctctgctgtttgtggcttgccaaggagctccagaaacagcagtcttaggcgctgagctcagcgcggtgggtgagaacggcggggagaaacccactcccagtccaccctggcggctccgccggtccaagcgctgctcctgctcgtccctgatggataaagagtgtgtctacttctgccacctggacatcatttgggtcaacactcccgagcacgttgttccgtatggacttggaagccctaggtccaagagagccttggagaatttacttcccacaaaggcaacagaccgtgagaatagatgccaatgtgctagccaaaaagacaagaagtgctggaatttttgccaagcaggaaaagaactcagggctgaagacattatggagaaagactggaataatcataagaaaggaaaagactgttccaagcttgggaaaaagtgtatttatcagcagttagtgagaggaagaaaaatcagaagaagttcagaggaacacctaagacaaaccaggtcggagaccatgagaaacagcgtcaaatcatcttttcatgatcccaagctgaaaggcaagccctccagagagcgttatgtgacccacaaccgagcacattggtgacagacttcggggcctgtctgaagccatagcctccacggagagccctgtggccgactctgcactctccaccctggctgggatcagagcaggagcatcctctgctggttcctgactggcaaaggaccagcgtcctcgttcaaaacattccaagaaaggttaaggagttcccccaaccatcttcactggcttccatcagtggtaactgctttggtctcttctttcatctggggatgacaatggacctctcagcagaaacacacagtcacattcgaattc

SEQ ID NO: 399 - skipped

SEQ ID NO: 400 - DNA, 429 bp, Homo Sapiens
gtgttggaatcaatcaatgtccatttcaggaagcttcttgtctgaatccgaagcacagctgtgtctgtaccctgctcagcagcctggggcctgggttgtctccttgtccatccactggtccattctgctctgatttttttgttcctcttttggaggttccactttgggtttgggctttgaaattatagggctacaagtacttgtcagctccttaattttagcttcaatctcttttgacttgacaactggatccatggtcaaactctgcttgttctgcagatttagcttgttattcatccactccattgcttcatttgtgcttttttctacctttgtcatgtcagcagcatccaaatgatcatactggtccccctgtttttgaaagagccgattattttcatatactgttggatctgtttccctagttct

SEQ ID NO: 401 - protein, 346 aa, Homo Sapiens
MAMVSEFLKQAWFIENEEQEYVQTVKSSKGGPGSAVSPYPTFNPSSDVAALHKAIMVKGVDEATIIDILTKRNNAQRQQIKAAYLQETGKPLDETLKKALTGHLEEVVLALLKTPAQFDADELRAAMKGLGTDEDTLIEILASRTNKEIRDINRVYREELKRDLAKDITSDTSGDFRNALLSLAKGDRSEDFGVNEDLADSDARALYEAGERRKGTDVNVFNTILTTRSYPQLRRVFQKYTKYSKHDMNKVLDLELKGDIEKCLTAIVKCATSKPAFFAEKLHQAMKGVGTRHKALIRIMVSRSEIDMNDIKAFYQKMYGISLCQAILDETKGDYEKILVALCGGN

SEQ ID NO: 402 - DNA, 1399 bp, Homo Sapiens
agtgtgaaatcttcagagaagaatttctctttagttctttgcaagaaggtagagataaagacactttttcaaaaatggcaatggtatcagaattcctcaagcaggcctggtttattgaaaatgaagagcaggaatatgttcaaactgtgaagtcatccaaaggtggtcccggatcagcggtgagcccctatcctaccttcaatccatcctcggatgtcgctgccttgcataaggccataatggttaaaggtgtggatgaagcaaccatcattgacattctaactaagcgaaacaatgcacagcgtcaacagatcaaagcagcatatctccaggaaacaggaaagcccctggatgaaacacttaagaaagcccttacaggtcaccttgaggaggttgttttagctctgctaaaaactccagcgcaatttgatgctgatgaacttcgtgctgccatgaagggccttggaactgatgaagatactctaattgagattttggcatcaagaactaacaaagaaatcagagacattaacagggtctacagagaggaactgaagagagatctggccaaagacataacctcagacacatctggagattttcggaacgctttgctttctcttgctaagggtgaccgatctgaggactttggtgtgaatgaagacttggctgattcagatgccagggccttgtatgaagcaggagaaaggagaaaggggacagacgtaaacgtgttcaataccatccttaccaccagaagctatccacaacttcgcagagtgtttcagaaatacaccaagtacagtaagcatgacatgaacaaagttctggacctggagttgaaaggtgacattgagaaatgcctcacagctatcgtgaagtgcgccacaagcaaaccagctttctttgcagagaagcttcatcaagccatgaaaggtgttggaactcgccataaggcattgatcaggattatggtttcccgttctgaaattgacatgaatgatatcaaagcattctatcagaagatgtatggtatctccctttgccaagccatcctggatgaaaccaaaggagattatgagaaaatcctggtggctctttgtggaggaaactaaacattcccttgatggtctcaagctatgatcagaagactttaattatatattttcatcctataagcttaaataggaaagtttcttcaacaggattacagtgtagctacctacatgctgaaaaatatagcctttaaatcatttttatattataactctgtataatagagataagtccattttttaaaaatgttttccccaaaccataaaaccctatacaagttgttctagtaacaatacatgagaaagatgtctatgtagctgaaaataaaatgacgtcacaagac

SEQ ID NO: 403 - protein, 439 aa, Homo Sapiens
MPLNVSFTNRNYDLDYDSVQPYFYCDEEENFYQQQQQSELQPPAPSEDIWKKFELLPTPPLSPSRRSGLCSPSYVAVTPFSLRGDNDGGGGSFSTADQLEMVTELLGGDMVNQSFICDPDDETFIKNIIIQDCMWSGFSAAAKLVSEKLASYQAARKDSGSPNPARGHSVCSTSSLYLQDLSAAASECIDPSVVFPYPLNDSSSPKSCASQDSSAFSPSSDSLLSSTESSPQGSPEPLVLHEETPPTTSSDSEEEQEDEEEIDVVSVEKRQAPGKRSESGSPSAGGHSKPPHSPLVLKRCHVSTHQHNYAAPPSTRKDYPAAKRVKLDSVRVLRQISNNRKCTSPRSSDTEENVKRRTHNVLERQRRNELKRSFFALRDQIPELENNEKAPKVVILKKATAYILSVQAEEQKLIZEEDLLRKRREQLKHKLEQLRNSCA

SEQ ID NO: 404 - DNA, 2121 bp, Homo Sapiens
ctgctcgcggccgccaccgccgggccccggccgtccctggctcccctcctgcctcgagaagggcagggcttctcagaggcttggcgggaaaaaagaacggagggagggatcgcgctgagtataaaagccggttttcggggctttatctaactcgctgtagtaattccagcgagaggcagagggagcgagcgggcggccggctagggtggaagagccgggcgagcagagctgcgctgcgggcgtcctgggaagggagatccggagcgaatagggggcttcgcctctggcccagccctcccgcttgatcccccaggccagcggtccgcaacccttgccgcatccacgaaactttgcccatagcagcgggcgggcactttgcactggaacttacaacacccgagcaaggacgcgactctcccgacgcggggaggctattctgcccatttggggacacttccccgccgctgccaggacccgcttctctgaaaggctctccttgcagctgcttagacgctggatttttttcgggtagtggaaaaccagcagcctcccgcgacgatgcccctcaacgttagcttcaccaacaggaactatgacctcgactacgactcggtgcagccgtatttctactgcgacgaggaggagaacttctaccagcagcagcagcagagcgagctgcagcccccggcgcccagcgaggatatctggaagaaattcgagctgctgcccaccccgcccctgtcccctagccgccgctccgggctctgctcgccctcctacgttgcggtcacacccttctcccttcggggagacaacgacggcggtggcgggagcttctccacggccgaccagctggagatggtgaccgagctgctgggaggagacatggtgaaccagagtttcatctgcgacccggacgacgagaccttcatcaaaaacatcatcatccaggactgtatgtggagcggcttctcggccgccgccaagctcgtctcagagaagctggcctcctaccaggctgcgcgcaaagacagcggcagcccgaaccccgcccgcggccacagcgtctgctccacctccagcttgtacctgcaggatctgagcgccgccgcctcagagtgcatcgacccctcggtggtcttcccctaccctctcaacgacagcagctcgcccaagtcctgcgcctcgcaagactccagcgccttctctccgtcctcggattctctgctctcctcgacggagtcctccccgcagggcagccccgagcccctggtgctccatgaggagacaccgcccaccaccagcagcgactctgaggaggaacaagaagatgaggaagaaatcgatgttgtttctgtggaaaagaggcaggctcctggcaaaaggtcagagtctggatcaccttctgctggaggccacagcaaacctcctcacagcccactggtcctcaagaggtgccacgtctccacacatcagcacaactacgcagcgcctccctccactcggaaggactatcctgctgccaagagggtcaagttggacagtgtcagagtcctgagacagatcagcaacaaccgaaaatgcaccagccccaggtcctcggacaccgaggagaatgtcaagaggcgaacacacaacgtcttggagcgccagaggaggaacgagctaaaacggagcttttttgccctgcgtgaccagatcccggagttggaaaacaatgaaaaggcccccaaggtagttatccttaaaaaagccacagcatacatcctgtccgtccaagcagaggagcaaaagctcatttctgaagaggacttgttgcggaaacgacgagaacagttgaaacacaaacttgaacagctacggaactcttgtgcgtaaggaaaagtaaggaaaacgattccttctaacagaaatgtcctgagcaatcacctatgaacttgtttcaaatgcatgatcaaatgcaacctcacaaccttggctgagtcttgagactgaaagatttagccataatgtaaactgcctcaaattggactttgggcataaaagaacttttttatgcttaccatcttttttttttctttaacagatttgtatttaagaattgtttttaaaaaattttaa

SEQ ID NO: 405 - protein, 1474 aa, Homo Sapiens
MGKNKLLHPSLVLLLLVLLPTDASVSGKPQYMVLVPSLLHTETTEKGCVLLSYLNETVTVSASLESVRGNRSLFTDLEAENDVLHCVAFAVPKSSSNEEVMFLTVQVKGPTQEFKKRTTVMVKNEDSLVFVQTDKSIYKPGQTVKFRVVSMDENFHPLNELIPLVYIQDPKGNRIAQWQSFQLEGGLKQFSFPLSSEPFQGSYKVVVQKKSGGRTEHPFTVEEFVLPKFEVQVTVPKIITILEEEMNVSVCGLYTYGKPVPGHVTVSICRKYSDASDCHGEDSQAFCEKFSGQLNSHGCFYQQVKTKVFQLKRKEYEMKLHTEAQIQEEGTVVELTGRQSSEITRTITKLSFVKVDSHFRQGIPFFGQVRLVDGKGVPIPNKVIFIRGNEANYYSNATTDEHGLVQFSINTTNVMGTSLTVRVNYKDRSPCYGYQWVSEEHEEAHHTAYLVFSPSKSFVHLEPMSHELPCGHTQTVQAHYILNGGTLLGLKKLSFYYLIMAKGGIVRTGTHGLLVKQEDMKGHFSISIPVKSDIAPVARLLIYAVLPTGDVIGDSAKYDVENCLANKVDLSFSPSQSLPASHAHLRVTAAPQSVCALRAVDQSVLLMKPDAELSASSVYNLLPEKDLTGFPGPLNDQDDEDCINRHNVYINGITYTPVSSTNEKDMYSFLEDMGLKAFTNSKIRKPKMCPQLQQYEMHGPEGLRVGFYESDVMGRGHARLVHVEEPHTETVRKYFPETWIWDLVVVNSAGVAEVGVTVPDTITEWKAGAFCLSEDAGLGISSTASLRAFQPFFVELTMPYSVIRGEAFTLKATVLNYLPKCIRVSVQLEASPAFLAVPVEKEQAPHCICANGRQTVSWAVTPKSLGNVNFTVSAEALESQELCGTEVPSVPEHGRKDTVIKPLLVEPEGLEKETTFNSLLCPSGGEVSEELSLKLPPNVVEESARASVSVLGDILGSAMQNTQNLLQMPYGCGEQNMVLFAPNIYVLDYLNETQQLTPEVKSKAIGYLNTGYQRQLNYKHYDGSYSTFGERYGRNQGNTWLTAFVLKTFAQARAYIFIDEAHITQALIWLSQRQKDNGCFRSSGSLLNNAIKGGVEDEVTLSAYITIALLEIPLTVTHPVVRNALFCLESAWKTAQEGDHGSHVYTKALLAYAFALAGNQDKRKEVLKSLNEEAVKKDNSVHWERPQKPKAPVGHFYEPQAPSAEVEMTSYVLLAYLTAQPAPTSEDLTSATNIVKWITKQQNAQGGFSSTQDTVVALHALSKYGAATFTRTGKAAQVTIQSSGTFSSKFQVDNNNRLLLQQVSLPELPGEYSMKVTGEGCVYLQTSLKYNILPEKEEFPFALGVQTLPQTCDEPKAHTSFQISLSVSYTGSRSASNMAIVDVKMVSGFIPLKPTVKMLERSNHVSRTEVSSNHVLIYLDKVSNQTLSLFFTVLQDVPVRDLKPAIVKVYDYYETDEFAIAEYNAPCSKDLGNA

SEQ ID NO: 406 - skipped

SEQ ID NO: 407 - protein, 92 aa, Homo Sapiens [sequence omitted]

SEQ ID NO: 408 - DNA, 667 bp, Homo Sapiens
agcacaggacacagctgggttctgaagcttctgagttctgcagcctcacctctgagaaaacctcttttccaccaataccatgaagctctgcgtgactgtcctgtctctcctcatgctagtagctgccttctgctctccagcgctctcagcaccaatgggctcagaccctcccaccgcctgctgcttttcttacaccgcgaggaagcttcctcgcaactttgtggtagattactatgagaccagcagcctctgctcccagccagctgtggtattccaaaccaaaagaagcaagcaagtctgtgctgatcccagtgagacctgggtccaggagtacgtgtatgacctggaactgaactgagctgctcagagacaggaagtcttcagggaaggtcacctgagcccggatgcttctccatgagacacatctcctccatactcaggactcctctccgcagttcctgtcccttctcttaatttaatcttttttatgtgccgtgttattgtattaggtgtcatttccattatttatattagtttagccaaaggataagtgtcccctatggggatggtccactgtcactgtttctctgctgttgcaaatacatggataacacatttgattctgtgtgttttcataataaaactttaaaataaaatgcagacagtt

SEQ ID NO: 409 - protein, 402 aa, Homo Sapiens
MESRGPLATSRLLLLLLLLLLRHTRQGWALRPVLPTQSAHDPPAVHLSNGPGQEPIAVMTFDLTKITKTSSSFEVRTWDPEGVIFYGDTNPKDDWFMLGLRDGRPEIQLHNHWAQLTVGAGPRLDDGRWHQVEVKMEGDSVLLEVDGEEVLRLRQVSGPLTSKRHPIMRIALGGLLFPASNLRLPLVPALDGCLRRDSWLDKQAEISASAPTSLRSCDVESNPGIFLPPGTQAEFNLRDIPQPHAEPWAFSLDLGLKQAAGSGHLLALGTPENPSWLSLHLQDQKVVLSSGSGPGLDLPLVLGLPLQLKLSMSRVVLSQGSKMKALALPPLGLAPLLNLWAKPQGRLFLGALPGEDSSTSFCLNGLWAQGQRLDVDQALNRSHEIWTHSCPQSPGNGTDASH

SEQ ID NO: 410 - DNA, 1209 bp, Homo Sapiens
atggagagcagaggcccactggctacctcgcgcctgctgctgttgctgctgttgctactactgcgtcacacccgccagggatgggccctgagacctgttctccccacccagagtgcccacgaccctccggctgtccacctcagcaatggcccaggacaagagcctatcgctgtcatgacctttgacctcaccaagatcacaaaaacctcctcctcctttgaggttcgaacctgggacccagagggagtgattttttatggggataccaaccctaaggatgactggtttatgctgggacttcgagacggcaggcctgagatccaactgcacaatcactgggcccagcttacggtgggtgctggaccacggctggatgatgggagatggcaccaggtggaagtcaagatggagggggactctgtgctgctggaggtggatggggaggaggtgctgcgcctgagacaggtctctgggcccctgaccagcaaacgccatcccatcatgaggattgcgcttggggggctgctcttccccgcttccaaccttcggttgccgctggttcctgccctggatggctgcctgcgccgggattcctggctggacaaacaggccgagatctcagcatctgcccccactagcctcagaagctgtgatgtagaatcaaatcccgggatatttctccctccagggactcaggcagaattcaatctccgagacattccccagcctcatgcagagccctgggccttctctttggacctgggactcaagcaggcagcaggctcaggccacctccttgctcttgggacaccagagaacccatcttggctcagtctccacctccaagatcaaaaggtggtgttgtcttctgggtcggggccagggctggatctgcccctggtcttgggactccctcttcagctgaagctgagtatgtccagggtggtcttgagccaagggtcgaagatgaaggcccttgccctgcctcccttaggcctggctcccctccttaacctctgggccaagcctcaagggcgtctcttcctgggggctttaccaggagaagactcttccacctctttttgcctgaatggcctttgggcacaaggtcagaggctggatgtggaccaggccctgaacagaagccatgagatctggactcacagctgcccccagagcccaggcaatggcactgacgcttcccattaa

SEQ ID NO: 411 - protein, 599 aa, Homo Sapiens
MADKLTRIAIVNHDKCKPKKCRQECKKSCPVVRMGKLCIEVTPQSKIAWISETLCIGCGICIKKCPFGALSIVNLPSNLEKETTHRYCANAFKLHRLPIPRPGEVLGLVGTNGIGKSAALKILAGKQKPNLGKYDDPPDWQEILTYFRGSELQNYFTKILEDDLKAIIKPQYVARFLRLAKGTVGSILDRKDETKTQAIVCQQLDLTHLKERNVEDLSGGELQRFACAVVCIQKADIFMFDEPSSYLDVKQRLKAAITIRSLINPDRYIIVVEHDLSVLDYLSDFICCLYGVPSAYGVVTMPFSVREGINIFLDGYVPTENLRFRDASLVFKVAETANEEEVKKMCMYKYPGMKKKMGEFELAIVAGEFTDSEIMVMLGENGTGKTTFIRMLAGRLKPDEGGEVPVLNVSYKPQKISPKSTGSVRQLLHEKIRDAYTHPQFVTDVMKPLQIENIIDQEVQTLSGGELQRVRLRLCLGKPADVYLIDEPSAYLDSEQRLMAARVVKRFILHAKKTAFVVEHDFIMATYLADRVIVFDGVPSKNTVANSPQTLLAGMNKFLSQLEITFRRDPNNYRPRINKLNSIKDVEQKKSGNYFFLDD

SEQ ID NO: 412 - DNA, 3568 bp, Homo Sapiens
ccggtcctgagacacgctgtgtggctgaaaagtgaaggcaagagctcatttggcctctgtgctcccctccgcaagggatcgtttctccagaagagctggatattctttcgcccagttatggcagacaagttaacgagaattgctattgtcaaccatgacaaatgtaaacctaagaaatgtcgacaggaatgcaaaaagagttgtcctgtagttcgaatgggaaaattatgcatagaggttacaccccagagcaaaatagcatggatttccgaaactctttgtattggttgtggtatctgtattaagaaatgcccctttggcgccttatcaattgtcaatctaccaagcaacttggaaaaagaaaccacacatcgatattgtgccaatgccttcaaacttcacaggttgcctatccctcgtccaggtgaagttttgggattagttggaactaatggtattggaaagtcagctgctttaaaaattttagcaggaaaacaaaagccaaaccttggaaagtacgatgatcctcctgactggcaggagattttgacttatttccgtggatctgaattacaaaattactttacaaagattctagaagatgacctaaaagccatcatcaaacctcaatatgtagccagattcctaaggctggcaaaggggacagtgggatctattttggaccgaaaagatgaaacaaagacacaggcaattgtatgtcagcagcttgatttaacccacctaaaagaacgaaatgttgaagatctttcaggaggagagttgcagagatttgcttgtgctgtcgtttgcatacagaaagctgatattttcatgtttgatgagccttctagttacctagatgtcaagcagcgtttaaaggctgctattactatacgatctctaataaatccagatagatatatcattgtggtggaacatgatctaagtgtattagactatctctccgacttcatctgctgtttatatggtgtaccaagcgcctatggagttgtcactatgccttttagtgtaagagaaggcataaacatttttttggatggctatgttccaacagaaaacttgagattcagagatgcatcacttgtttttaaagtggctgagacagcaaatgaagaagaagttaaaaagatgtgtatgtataaatatccaggaatgaagaaaaaaatgggagaatttgagctagcaattgtagctggagagtttacagattctgaaattatggtgatgctgggggaaaatggaacgggtaaaacgacatttatcagaatgcttgctggaagacttaaacctgatgaaggaggagaagtaccagttctaaatgtcagttataagccacagaaaattagtcccaaatcaactggaagtgttcgccagttactacatgaaaagataagagatgcttatactcacccacaatttgtgaccgatgtaatgaagcctctgcaaattgaaaacatcattgatcaagaggtgcagacattatctggtggtgaactacagcgagtacgtttacgcctttgcttgggcaaacctgctgatgtctatttaattgatgaaccatctgcatatttggattctgagcaaagactgatggcagctcgagttgtcaaacgtttcatactccatgcaaaaaagacagcctttgttgtggaacatgacttcatcatggccacctatctagcggatcgcgtcatcgtttttgatggtgttccatctaagaacacagttgcaaacagtcctcaaacccttttggctggcatgaataaatttttgtctcagcttgaaattacattcagaagagatccaaacaactataggccacgaataaacaaacttaattcaattaaggatgtagaacaaaagaagagtggaaactactttttcttggatgattagactgactctgagaatattgataagccatttattaaaaggagtatttactagaattttttgtcatataaaacttgaatcaggattttatgccccacatactctggaacttgaagtataatatacttaatataacataaaaagccagttgggttctaaattgtagttgaaacacagaaaatgccacttttctgttcctgaagaggctcttttgtgcataatattctaaaatgaagacatttcaagctatacaaattacttccaagttttcatgatgtatgggaagattttcagtaggtgtattatattcacggtaccaaatgctgaccagtgttgctccattttttaaatcttgaaaagggtttctgtacttacctggtttgccaagtatgccagtgtaatgaaactgcccttattttaaaagccagtcaaagattccactgattgacatttgataaataaacatcaggattatgtttattgtttgttttcagtctttgcactatattaccagtatatggtttccgaggaagattatctactgcaaaacaccactgttggaaaaataggtatttttaaattgtttttaatccttttttggtgcttttaaacatgtttaagcaaaaaccaattcagtccattccccgcaaaaaacccctaactttactctgaactttttttgtttttgcattccatgaggttctgtattcagtcattctctaggtaatgtcatttttgtacacatatatttatataatcactgattgagatttaggaaaaagcatttctaaagaatatttgcttcccttagaactacagactcgaaatctttaaagatggtgcctaagcatctatgtattttttttaagttccacagatttttctgttgggcaggccaaggattataaaccacttccctaaaggcaacattaatgcaaaagtccccagatggcaatacaaagtatcccctggtaccacatatattcatttgtgagtttggatatagagcacattatctaaaccattttgtagttccaaaaacccatctaaatttcttgagttcctgaattttgaacaggattacctggagcctggagccactttaagttgtacttctgactaaactggaattatgagtgaggaagagtgtttactaaataaatgactggggcaagcaaaattgaggaggaaattagaaactgtttgacaaactttaagagctacttgaaataacagaagtcttgattaatatgcaaataatggctagaaagtatggtttaactggaccctattatgccttttaaaaataatttcagtaacccataaatacatgttgtaaaaaattcaaatatacagaatggaataaaaaaatgatctccctttattaccctcccaaaggttaccagcgtttgaatttaataatgtatattctttcatgcttttttctgtgcacttacctaagtgtgaatatgtaaagggtttgttttgtatacaaatgggattatactaaaataagtaatgcctatttttaaggataggttaaatttgtgaatgatcatttcaaatatattgaataaaataagcaaaagctattgttatttactgatcctgaaaaaaaaaaaaaaaaaaaaaaaaaaaaaaaaaaaaaaaaaaa

SEQ ID NO: 413 - protein, 531 aa, Homo Sapiens
MAAVKTLNPKAEVARAQAALAVNISAARGLQDVLRTNLGPKGTMKMLVSGAGDIKLTKDGNVLLHEMQIQHPTASLIAKVATAQDDITGDGTTSNVLIIGELLKQADLYISEGLHPRIITEGFEAAKEKALQFLEEVKVSREMDRETLIDVARTSLRTKVHAELADVLTEAVVDSILAIKKQDEPIDLFMIEIMEMKHKSETDTSLIRGLVLDHGARHPDMKKRVEDAYILTCNVSLEYEKTEVNSGFFYKSAEEREKLVKAERKFIEDRVKKIIELKRKVCGDSDKGFVVINQKGIDPFSLDALSKEGIVALRRAKRRNMERLTLACGGVALNSFDDLSPDCLGHAGLVYEYTLGEEKFTFIEKCNNPRSVTLLIKGPNKHTLTQIKDAVRDGLRAVKNAIDDGCVVPGAGAVEVAMAEALIKHKPSVKGRAQLGVQAFADALLIIPKVLAQNSGFDLQETLVKIQAEHSESGQLVGVDLNTGEPMVAAEVGVWDNYCVKKQLLHSCTVIATNILLVDEIMRAGMSSLKG

SEQ ID NO: 414 - DNA, 2010 bp, Homo Sapiens
cgagaagacccggatagttcctcccggccacgccgcgccggctctgggcactcagcatcgtttccttttcctccgctggagcagctatggcggcggtgaagaccctgaaccccaaggccgaggtggcccgagcgcaggcggcgctggcggtcaacatcagcgcagcgcggggtctgcaggacgtgctaaggaccaacctggggcccaagggcaccatgaagatgctcgtttctggcgctggagacatcaaacttactaaagacggcaatgtgctgcttcacgaaatgcaaattcaacacccaacagcttccttaatagcaaaggtagcaacagcccaggatgatataactggtgatggtacgacttctaatgtcctaatcattggagagctgctgaaacaggcggatctctacatttctgaaggccttcatcctagaataatcactgaaggatttgaagctgcaaaggaaaaggcccttcagtttttggaagaagtcaaagtaagcagagagatggacagggaaacacttatagatgtggccagaacatctcttcgtactaaagttcatgctgaacttgcagatgtcttaacagaggctgtagtggactccattttggccattaaaaagcaagatgaacctattgatctcttcatgattgagatcatggagatgaaacataaatctgaaactgatacaagcttaatcagagggcttgttttggaccacggagcacggcatcctgatatgaagaaaagggtggaggatgcatacatcctcacttgtaacgtgtcattagagtatgagaaaacagaagtgaattctggctttttttacaagagtgcagaagagagagaaaaactcgtgaaagctgaaagaaaattcattgaagatagggttaaaaaaataatagaactgaaaaggaaagtctgtggcgattcagataaaggatttgttgttattaatcaaaagggaattgaccccttttccttagatgctctttcaaaagaaggcatagtcgctctgcgcagagctaaaaggagaaatatggagaggctgactcttgcttgtggtggggtagccctgaattcttttgacgacctaagtcctgactgcttgggacatgcaggacttgtatatgagtatacattgggagaagagaagtttacctttattgagaaatgtaacaaccctcgttctgtcacattattgatcaaaggaccaaataagcacacactcactcagatcaaagatgcagtgagggacggcttgagggctgtcaaaaatgctattgatgatggctgtgtggttccaggtgctggtgccgtggaagtggcaatggcagaagccctgattaaacataagcccagtgtaaagggcagggcacagcttggagtccaagcatttgctgatgcattgctcattattcccaaggttcttgctcagaactctggttttgaccttcaggaaacattagttaaaattcaagcagaacattcagaatcaggtcagcttgtgggtgtggacctgaacacaggtgagccaatggtggcagcagaagtaggcgtatgggataactattgtgtaaagaaacagcttcttcactcctgcactgtgattgccaccaacattctcttggttgatgagatcatgcgagctggaatgtcttctctgaaaggttgaattgaagcttcctctgtatctgaatcttgaagactgcaaagtgatcctgaggattacagctgtggaatttttgtccaagcttcaaataattttgaaagaaattttcccatatgaaaaaaggagagaacactggcatctgttgaaatttggaagttctgaaattatagtatttttaaaaattgcactgaagtgtatacacataaagcaggtcttttatccagtgaacaggatgttttgctttagcagcagtgacataaaattccatgttagataagcatatgttacttaccttgttattaaatatttcttgaaaagcaggccacgaagg

SEQ ID NO: 415 - protein, 554 aa, Homo Sapiens
MTAPGAAGRCPPTTWLGSLLLLVCLLASRSITEEVSEYCSHMIGSGHLQSLQRLIDSQMETSCQITFEFVDQEQLKDPVCYLKKAFLLVQDIMEDTMRFRDNTANPIAIVQLQELSLRLKSCFTKDYEEHDKACVRTFYETPLQLLEKVKNVFNETKNLLDKDWNIFSKNCNNSFAECSSQDVVTKPDCNCLYPKAIPSSDPASVSPHQPLAPSMAPVAGLTWEDSEGTEGSSLLPGEQPLHTVDPGSAKQRPPRSTCQSFEPPETPVVKDSTIGGSPQPRPSVGAFNPGMEDILDSAMGTNWVPEEASGEASEIPVPQGTELSPSRPGGGSMQTEPARPSNFLSASSPLPASAKGQQPADVTATALPRVGPVMPTGQDWNHTPQKTDHPSALLRDPPEPGSPRISSLRPQALSNPSTLSAQPQLSRSHSSGSVLPLGELEGRRSTRDRTSPAEPEAAPASEGAARPLPRFNSVPLTDTGHERQSEGSSSPQLQESVFHLLVPSVILVLLAVGGLLFYRWRRRSHQEPQRADSPLEQPEGSPLTQDDRQVELPV

SEQ ID NO: 416 - DNA, 3939 bp, Homo Sapiens
cctgggtcctctcggcgccagagccgctctccgcatcccaggacagcggtgcggccctcggccggggcgcccactccgcagcagccagcgagccagctgccccgtatgaccgcgccgggcgccgccgggcgctgccctcccacgacatggctgggctccctgctgttgttggtctgtctcctggcgagcaggagtatcaccgaggaggtgtcggagtactgtagccacatgattgggagtggacacctgcagtctctgcagcggctgattgacagtcagatggagacctcgtgccaaattacatttgagtttgtagaccaggaacagttgaaagatccagtgtgctaccttaagaaggcatttctcctggtacaagacataatggaggacaccatgcgcttcagagataacaccgccaatcccatcgccattgtgcagctgcaggaactctctttgaggctgaagagctgcttcaccaaggattatgaagagcatgacaaggcctgcgtccgaactttctatgagacacctctccagttgctggagaaggtcaagaatgtctttaatgaaacaaagaatctccttgacaaggactggaatattttcagcaagaactgcaacaacagctttgctgaatgctccagccaagatgtggtgaccaagcctgattgcaactgcctgtaccccaaagccatccctagcagtgacccggcctctgtctcccctcatcagcccctcgccccctccatggcccctgtggctggcttgacctgggaggactctgagggaactgagggcagctccctcttgcctggtgagcagcccctgcacacagtggatccaggcagtgccaagcagcggccacccaggagcacctgccagagctttgagccgccagagaccccagttgtcaaggacagcaccatcggtggctcaccacagcctcgcccctctgtcggggccttcaaccccgggatggaggatattcttgactctgcaatgggcactaattgggtcccagaagaagcctctggagaggccagtgagattcccgtaccccaagggacagagctttccccctccaggccaggagggggcagcatgcagacagagcccgccagacccagcaacttcctctcagcatcttctccactccctgcatcagcaaagggccaacagccggcagatgtaactgctacagccttgcccagggtgggccccgtgatgcccactggccaggactggaatcacaccccccagaagacagaccatccatctgccctgctcagagaccccccggagccaggctctcccaggatctcatcactgcgcccccaggccctcagcaacccctccaccctctctgctcagccacagctttccagaagccactcctcgggcagcgtgctgccccttggggagctggagggcaggaggagcaccagggatcggacgagccccgcagagccagaagcagcaccagcaagtgaaggggcagccaggcccctgccccgttttaactccgttcctttgactgacacaggccatgagaggcagtccgagggatcctccagcccgcagctccaggagtctgtcttccacctgctggtgcccagtgtcatcctggtcttgctggctgtcggaggcctcttgttctacaggtggaggcggcggagccatcaagagcctcagagagcggattctcccttggagcaaccagagggcagccccctgactcaggatgacagacaggtggaactgccagtgtagagggaattctaagctggacgcacagaacagtctcttcgtgggaggagacattatggggcgtccaccaccacccctccctggccatcctcctggaatgtggtctgccctccaccagagctcctgcctgccaggactggaccagagcagccaggctggggcccctctgtctcaacccgcagacccttgactgaatgagagaggccagaggatgctccccatgctgccactatttattgtgagccctggaggctcccatgtgcttgaggaaggctggtgagcccggctcaggaccctcttccctcaggggctgcagcctcctctcactcccttccatgccggaacccaggccagggacccaccggcctgtggtttgtgggaaagcagggtgcacgctgaggagtgaaacaaccctgcacccagagggcctgcctggtgccaaggtatcccagcctggacaggcatggacctgtctccagacagaggagcctgaagttcgtggggcgggacagcctcggcctgatttcccgtaaaggtgtgcagcctgagagacgggaagaggaggcctctgcacctgctggtctgcactgacagcctgaagggtctacaccctcggctcacctaagtccctgtgctggttgccaggcccagaggggaggccagccctgccctcaggacctgcctgacctgccagtgatgccaagagggggatcaagcactggcctctgcccctcctccttccagcacctgccagagcttctccagcaggccaagcagaggctcccctcatgaaggaagccattgcactgtgaacactgtacctgcctgctgaacagcctccccccgtccatccatgagccagcatccgtccgtcctccactctccagcctctccccagcctcctgcactgagctggcctcaccagtcgactgagggagcccctcagccctgaccttctcctgacctggcctttgactccccggagtggagtggggtgggagaacctcctgggccgccagccagagccgctctttaggctgtgttcttcgcccaggtttctgcatcttccactttgacattcccaagagggaagggactagtgggagagagcaagggaggggagggcacagacagagagcctacagggcgagctctgactgaagatgggcctttgaaatataggtatgcacctgaggttgggggagggtctgcactcccaaaccccagcgcagtgtcctttccctgctgccgacaggaacctggggctgagcaggttatccctgtcaggagccctggactgggctgcatctcagccccacctgcatggtatccagctcccatccacttctcacccttctttcctcctgaccttggtcagcagtgatgacctccaactctcacccaccccctctaccatcacctctaaccaggcaagccagggtgggagagcaatcaggagagccaggcctcagcttccaatgcctggagggcctccactttgtggccagcctgtggtgctggctctgaggcctaggcaacgagcgacagggctgccagttgcccctgggttcctttgtgctgctgtgtgcctcctctcctgccgccctttgtcctccgctaagagaccctgccctacctggccgctgggccccgtgactttcccttcctgcccaggaaagtgagggtcggctggccccaccttccctgtcctgatgccgacagcttagggaagggcactgaacttgcatatggggcttagccttctagtcacagcctctatatttgatgctagaaaacacatatttttaaatggaagaaaaataaaaaggcattcccccttcatccccctaccttaaacatataatattttaaaggtcaaaaaagcaatccaacccactgcagaagctctttttgagcacttggtggcatcagagcaggaggagccccagagccacctctggtgtcccccaggctacctgctcaggaaccccttctgttctctgagaactcaacagaggacattggctcacgcactgtgagattttgtttttatacttgcaactggtgaattattttttataaagtcatttaaatatctatttaaaagataggaagctgcttatatatttaataataaaagaagtgcacaagctgccgttgacgtagctcgag

SEQ ID NO: 417 - protein, 374 aa, Homo Sapiens
MSVPAFIDISEEDQAAELRAYLKSKGAEISEENSEGGLHVDLAQIIEACDVCLKEDDKDVESVVNSVVSLLLILEPDKQEALIESLCEKLVKFREGERPSLRLQLLSNLFHGMDKNTPVRYTVYCSLIEVVASCGAIQYIPTELDQVRKWISDWNLTTEKKHTLLRLLYEALADCKKSDAASKVMVELLGSYTEDNASQARVDAHRCIVEPLKDPNAFLFDHLLTLKPVKFLEGELIHDLLTIFVSAKLASYVKFYQNNKDFIDSLGLLHEQNMAKMRLLTFMGMAIENKEISFDTMQQELQIGADDVEAFVIDAVRTKMVYCKIDQTQRKVVVSHSTHRTFGKQRWQQLYDTLNAWKQNLNKVKNSLLSLSDT

SEQ ID NO: 418 - DNA, 1249 bp, Homo Sapiens
gggtcggcgtggtcttgcgagtggagtgtccgctgtgcccgggcctgcaccatgagcgtcccggccttcatcgacatcagtgaagaagatcaggctgctgagcttcgtgcttatctgaaatctaaaggagctgagatttcagaagagaactcggaaggtggacttcatgttgatttagctcaaattattgaagcctgtgatgtgtgtctgaaggaggatgataaagatgttgaaagtgtggtgaacagtgtggtatccctactcttgatcctggaaccagacaagcaagaagctttgattgaaagcctatgtgaaaagctggtcaaatttcgcgaaggtgaacgcccgtctctgagactgcagttgttaagcaaccttttccacgggatggataagaatactcctgtaagatacacagtgtattgcagccttattgaagtggtagcatcttgtggggccatccagtacatcccaactgagctggatcaagttagaaaatggatttctgactggaatctcaccactgaaaaaaagcacacccttttaagactactttatgaggcacttgcggattgtaagaagagtgatgctgcttcaaaagtcatggtggaattgctcggaagttacacagaggacaatgcttcccaggctcgagttgatgcccacaggtgtattgtcgaaccattgaaagatccaaatgcatttctttttgaccaccttcttactttaaaaccagtcaagtttttggaaggcgagcttattcatgatcttttaaccatttttgtgagtgctaaattggcatcatatgtcaagttttatcagaataataaagacttcattgattcacttggcctgttacatgaacagaatatggcaaaaatgagactacttacttttatgggaatggcaatagaaaataaggaaatttcttttgacacaatgcagcaagaacttcagattggagctgatgatgttgaagcatttgttattgacgccgtaagaactaaaatggtctactgcaaaattgatcagacccagagaaaagtagttgtcagtcatagcacacatcggacatttggaaaacagcggtggcaacaactgtatgacacacttaatgcctggaaacaaaatctgaacaaagtgaaaaacagccttttgagtctttccgatacctgagtttttatgcttataatttttgttctttgaaaaaaaagccctaaatcatagtaagacattataaaccaaaaaa

SEQ ID NO: 419 - protein, 395 aa, Homo Sapiens
MSANATLKPLCPILEQMSRLQSHSNTSIRYIDHAAVLLHGLASLLGLVENGVILFVVGCRMRQTVVTTWVLHLALSDLLASASLPFFTYFLAVGHSWELGTTFCKLHSSIFFLNMFASGFLLSAISLDRCLQVVRPVWAQNHRTVAAAHKVCLVLWALAVLNTVPYFVFRDTISRLDGRIMCYYNVLLLNPGPDRDATCNSRQAALAVSKFLLAFLVPLAIIASSHAAVSLRLQHRGRRRPGRFVRLVAAVVAAFALCWGPYHVFSLLEARAHANPGLRPLVWRGLPFVTSLAFFNSVANPVLYVLTCPDMLRKLRRSLRTVLESVLVDDSELGGAGSSRRRRTSSTARSASPLALCSRPEEPRGPARLLGWLLGSCAASPQTGPLNRALSSTSS

SEQ ID NO: 420 - DNA, 2901 bp, Homo Sapiens
cagcctccctctcccacctctgtctgcccgctgcctcttgtctagctgctgtcaggagctgactgcctccagggctggaatcctgtgctccctctgtgcccagagccccacgatgtcggccaacgccacactgaagccactctgccccatcctggagcagatgagccgtctccagagccacagcaacaccagcatccgctacatcgaccacgcggccgtgctgctgcacgggctggcctcgctgctgggcctggtggagaatggagtcatcctcttcgtggtgggctgccgcatgcgccagaccgtggtcaccacctgggtgctgcacctggcgctgtccgacctgttggcctctgcttccctgcccttcttcacctacttcttggccgtgggccactcgtgggagctgggcaccaccttctgcaaactgcactcctccatcttctttctcaacatgttcgccagcggcttcctgctcagcgccatcagcctggaccgctgcctgcaggtggtgcggccggtgtgggcgcagaaccaccgcaccgtggccgcggcgcacaaagtctgcctggtgctttgggcactagcggtgctcaacacggtgccctatttcgtgttccgggacaccatctcgcggctggacgggcgcattatgtgctactacaatgtgctgctcctgaacccggggcctgaccgcgatgccacgtgcaactcgcgccaggcggccctggccgtcagcaagttcctgctggccttcctggtgccgctggcgatcatcgcctcgagccacgcggccgtgagcctgcggttgcagcaccgcggccgccggcggccaggccgcttcgtgcgcctggtggcagccgtcgtggccgccttcgcgctctgctgggggccctaccacgtgttcagcctgctggaggcgcgggcgcacgcaaacccggggctgcggccgctcgtgtggcgcgggctgcccttcgtcaccagcctggccttcttcaacagcgtggccaacccggtgctctacgtgctcacctgccccgacatgctgcgcaagctgcggcgctcgctgcgcacggtgctggagagcgtgctggtggacgacagcgagctgggtggcgcgggaagcagccgccgccgccgcacctcctccaccgcccgctcggcctcccctttagctctctgcagccgcccggaggaaccgcggggccccgcgcgtctcctcggctggctgctgggcagctgcgcagcgtccccgcagacgggccccctgaaccgggcgctgagcagcacctcgagttagaacccggcccacgtagggcggcactcacacgcgaaagtatcaccagggtgccgcggttcaattcgatatccggactcctgccgcagtgatcaaagtccgaggggcgggacccaggcacctgcattttaaagcgccccgggagactctgaatctttttcagaaacagtgagttaaagcagtgcttctcaaaccttgatgtgcctgtgaatcacctaggggtcttgttaagtgcagtctgatccaggaggccggggccgggtactgagagtctgcacttaacaagctcccaggccgagaagccagtgcggcaggttcacaggcgaggcctggagtaacacaaagtgaaactcgtaatagacttcccactctagggcagtggagtcggaagggcacacggggtgcgtctccccggagttcagttttaccagatgatgggggaggggggaaggagttttatgttaaaccatccatgtatttttggagaagagagaggaaaggtttgagaagcactgttccagcctgccctcttcatttagccaatgcttactgcgctagacgcttcatcccacaatcttaaggggcagcttctattagccagtctttacagctgagcacattctggctcagggaggttaagtgacttgcccagtttcagggctaacgaccacagggtctgcactctaaccctaggcatcacatgctcaatgactctctggtgagcgaggacattctctgacctactcgagggacttaagatgctaccttgtgacccagcactgcccaaagtgcttccaaggcagaagcagcaggggatggcgtggtcaagcactcgggaaacctggggctaatcaaatccaatgggggaaatgactaaaagtcttcggtcgttagaagttgaatgggcacagcaactctaagactacagcacacgtcatttcttagctaagcggaccagcctccctgtcggcctggtgttctgtgggatccctctgggcactggtaatcccaagatctgtgcagccccgcctccaggccacatggggctgggcagctaccatttcccttttgcggatgggaggggtaacttgcacctctgacctatcacttccactgcaccccgtctcattcctccacctgccgtggacttggggtcagagactgctgtgtttgagctctgcagcccagggaccgaaaagttggtgtcaatgaattttgcttggtggatgaaatgtcagtggaagaagcagatgagaaactcttgagatcttggtcctgtgttttttctgccaccaaaggccagggtcactgaaggcctggcccacagcaggtgctgagcaaagggaacagtgaggtgcccagctagctgcagagccaccctgtgttgacacctcgcccctgctccctcccatcccttccccctttactcatagcacttcccccattggacacgtggtgcattttgcttgtttattatgttttctctccatcagaatgaaagctcctcgagggcagggactttggtctattgtctgtatttgccggtgcctaggattgtgcctgtatgcaacaggcactcaataaatatttttgctgtagactgg

SEQ ID NO: 421 - protein, 564 aa, Homo Sapiens
MASTSTTIRSHSSSRRGFSASSARLPGVSRSGFSSISVSRSRGSGGLGGACGGAGFGSRSLYGLGGSKRISIGGGSCAISGGYGSRAGGSYGFGGAGSGFGFGGGAGIGFGLGGGAGLAGGFGGPGFPVCPPGGIQEVTVNQSLLTPLNLQIDPAIQRVRAEEREQIKTLNNKFASFIDKVRFLEQQNKVLDTKWTLLQEQGTKTVRQNLEPLFEQYINNLRRQLDSIVGERGRLDSELRNMQDLVEDLKNKYEDEINKRTAAENEFVTLKKDVDAAYMNKVELQAKADTLTDEINFLRALYDAELSQMQTHISDTSVVLSMDNNRNLDLDSIIAEVKAQYEEIAQRSRAEAESWYQTKYEELQVTAGRHGDDLRNTKQEIAEINRMIQRLRSEIDHVKKQCANLQAAIADAEQRGEMALKDAKNKLEGLEDALQKAKQDLARLLKEYQELMNVKLALDVEIATYRKLLEGEECRLNGEGVGQVNISVVQSTVSSGYGGASGVGSGLGLGGGSSYSYGSGLGVGGGFSSSSGRATGGGLSSVGGGSSTIKYTTTSSSSRKSYKH

SEQ ID NO: 422 - DNA, 1695 bp, Homo Sapiens
atggccagcacatccaccaccatcaggagccacagcagcagccgccggggtttcagtgccagctcagccaggctccctggggtcagccgctctggcttcagcagcatctccgtgtcccgctccaggggcagtggtggcctgggtggcgcatgtggaggagctggctttggcagccgcagtctgtatggcctggggggctccaagaggatctccattggagggggcagctgtgccatcagtggcggctatggcagcagagccggaggcagctatggctttggtggcgccgggagtggatttggtttcggtggtggagccggcattggctttggtctgggtggtggagccggccttgctggtggctttgggggccctggcttccctgtgtgcccccctggaggcatccaagaggtcactgtcaaccagagtctcctgactcccctcaacctgcaaattgaccccgccatccagcgggtgcgggccgaggagcgtgagcagatcaagaccctcaacaacaagtttgcctccttcatcgacaaggtgcggttcctagagcagcagaacaaggttctggacaccaagtggaccctgctgcaggagcagggcaccaagactgtgaggcagaacctggagccgttgttcgagcagtacatcaacaacctcaggaggcagctggacagcatcgtgggggaacggggtcgtctggactcggagctgagaaacatgcaggacctggtggaggacctcaagaacaaatatgaggatgaaatcaacaagcgcacagcagcagagaatgaatttgtgactctgaagaaggatgtggatgctgcctacatgaacaaggttgaactgcaagccaaggcagacactcttacagatgagatcaacttcctgagagccttgtatgatgcagagctgtcccagatgcagacccacatctcagacacatccgtggtgctatccatggacaacaaccgcaacctggacctggacagcatcatcgctgaggtcaaggcccaatatgaggagattgctcagaggagcagggctgaggctgagtcctggtaccagacaaagtacgaggagctgcaggtcacagcaggcagacatggggacgacctgcgcaacaccaagcaggagattgctgagatcaaccgcatgatccagaggctgagatctgagatcgaccacgtcaagaagcagtgtgccaacctacaggctgccattgctgatgctgagcagcgtggggagatggccctcaaggatgctaagaacaagctggaagggctggaggatgccctgcagaaggccaagcaggacctggcccggctgctgaaggagtaccaggagctgatgaacgtcaagctggccctggacgtggagatcgccacctaccgcaagctgctggagggcgaggagtgcaggctgaatggcgaaggcgttggacaagtcaacatctctgtagtgcagtccaccgtctccagtggctatggcggtgccagcggtgtcggcagtggcttaggcctgggtggaggaagcagctactcctatggcagtggtcttggcgttggaggcggctttagttccagcagcggcagagccactgggggtggcctcagctctgttggaggcggcagttccaccatcaagtacaccaccacctcctcctccagcaggaagagctacaagcactga

SEQ ID NO: 423 - protein, 575 aa, Homo Sapiens
MNGPALQPSSPSSAPSASPAAAPRGWSEFCELHAVAAARELARQYWLFAREHPQHAPLRAELVSLQFTDLFQRYFCREVRDGRAPGRDYRDTGRGPPAKAEASPEPGPGPAAPGLPKARSSEELAPPRPPGPCSFQHFRRSLRHIFRRRSAGELPAAHTAAAPGTPGEAAETPARPGLAKKFLPWSLAREPPPEALKEAVLRYSLADEASMDSGARWQRGRLALRRAPGPDGPDRVLELFDPPKSSRPKLQAACSSIQEVRWCTRLEMPDNLYTFVLKVKDRTDIIFEVGDEQQLNSWMAELSECTGRGLESTEAEMHIPSALEPSTSSSPRGSTDSLNQGASPGGLLDPACQKTDHFLSCYPWFHGPISRVKAAQLVQLQGPDAHGVFLVRQSETRRGEYVLTFNFQGIAKHLRLSLTERGQCRVQHLHFPSVVDMLHHFQRSPIPLECGAACDVRLSSYVVVVSQPPGSCNTVLFPFSLPHWDSESLPHWGSELGLPHLSSSGCPRGLSPEGLPGRSSPPEQIFHLVPSPEELANSLQHLEHEPVNRARDSDYEMDSSSRSHLRAIDNQYTPL

SEQ ID NO: 424 - DNA, 5423 bp, Homo Sapiens
cccgggccaccgcctccgcccggctgcccgcccggactgtcgcggcccgcggtggcgacggcggccgctgcaaagtttccccggcggcggcggcccgggggcgcatcctcccgcaactgtcaagcgctggcggcggaaatgatgaggcgctggccattttccgagcccgggtttcctgcctgagccccgctcgagcgagccgcgagcgaggagccggcgggcgggagaggacgcgcccagggcgggggcccgcccgccccctcgggatttcgagggcccgggggcgcgcgacgccatgggccggccgggcccagagctcctgtctctcagcccggccgcaccacctgggtctccgccatgaacgggcctgccctgcagccctcctcgccctcttccgcgccctcagcctccccggcggcggccccgcggggctggagcgagttctgtgagttgcacgccgtagcggcggcccgggagctggcccgccagtactggctgttcgcccgggagcatccgcagcacgcgccgctgcgcgccgagctggtgtcgctgcagttcaccgacctcttccagcgctacttctgccgcgaggtgcgcgacggacgggcgccgggccgcgactaccgggacacaggccgtgggcccccagccaaggccgaggcgtccccggagccaggccccggccccgccgcccctggcctgcccaaggcccgcagctctgaggagctggccccgccgcggccgcccgggccctgctccttccagcactttcgccgcagcctccgccacatcttccgccgccgctcggccggggagctgccagcggcccacaccgctgccgcccccgggacccccggagaggctgctgagacccccgcccggcctggcctggccaagaagttcctgccctggagcctggcccgggagccgccacccgaggcgctgaaggaggcggtgctgcgctacagcctggccgacgaggcctccatggacagcggggcacgctggcagcgcgggaggctggcgctgcgccgggccccgggccccgatggccccgaccgcgtgctggagctcttcgacccacccaagagttcaaggcccaagctacaagcagcttgctccagcatccaggaggtccggtggtgcacacggcttgagatgcctgacaacctttacacctttgtgctgaaggtgaaggaccggacagacatcatctttgaggtgggagacgagcagcagctgaattcatggatggctgagctctcggagtgcacaggccgagggctggagagcacagaagcagagatgcatattccctcagccctagagcctagcacgtccagctccccaaggggcagcacagattcccttaaccaaggtgcttctcctggggggctgctggacccggcctgccagaagacggaccatttcctgtcctgctacccctggttccacggccccatctccagagtgaaagcagctcagctggttcagctgcagggccctgatgctcatggagtgttcctggtgcggcagagcgagacgcggcgtggggaatacgtgctcactttcaactttcaggggatagccaagcacctgcgcctgtcgctgacagagcggggccagtgccgtgtgcagcacctccactttccctcggtcgtggacatgctccaccacttccagcgctcgcccatcccactcgagtgcggcgccgcctgtgatgtccggctctccagctacgtggtagtcgtctcccaaccaccaggttcctgcaacacggtcctcttccctttctcccttcctcactgggattcagagtcccttcctcactggggttcagagttgggccttccccaccttagttcttctggctgtccccgggggctcagcccagagggtctcccagggcgatcctcaccccccgagcagatcttccacctggtgccttcgcccgaagaactggccaacagcctgcagcacctggagcatgagcctgtgaatcgagcccgggactcggactacgaaatggactcatcctcccggagccacctgcgggccatagacaatcagtacacacctctctgaccagtgaggaattccaggcctcaacagctgcccttgaggagcacaggcagaagtgtgaacttgtgaatgtaattgatctttccttccttccagagaaagatttaagggacactgttaactgctcgtgccagtttggaagtgacccttctattaggcctgttgaagggccctcctgtaggtttcatctatccacctggctttctccttattgtttacagatgtagttcttgttagaggatgccgctagctcctgcccggggtccctatgcccagtccccgttactcttagagaaaggagttggggtgagggccagagctggcagtggaaacttgttctctttttcactgacactgtcacagcggatgacagactttctacggggaggagggggggatcatcaggaagcccagaacactaacaagcggttctcccatctaccgtcagtccacatggcaggtctgctgtgtccacaccacagatgaccacatctaatcctgcttctactctcagctttaggacaaaagctctgtcagaggcacaagctgaaggtcaaaaatgatttaaaacattttacctcagactaatttctttaaaggattcaggttcaaaacttaaccactgcttatttcagtgcactgtttcaactaacacccatgctatttttgtagtcagaaacagctatgcaaaccctacctaatttacagtctgagccagcatgctggcttgtctactgcatcctcgggacagtcacctgccactgagtggccactgtccttcctaaatgtcaagaagtgaagtatgtcaccctttcagggaaattcaggcaattactgaaataggaaggtggcaagaacagttctatcctggtgccttacgaataaaaaactggattctggtttacagcagctttacagtgatagttaaattaactggggctaggggaaaagcaaccaaaaagggaaaaaggactcctaggccctttctattaaatccttcagcaacaaggctggcttggtgccctccaagcatctaatggcttattaaattatcccacaattgggttttaggctccttttttgacccaaaatggaagctgggaatctggtgccataactaatgagaaactcctttaataccccacaatcagtgttctgttctacctggctactgcttcactggattgaaaatctatctatctccttgcacacatgggcacacacaatctccaccatccagggaggtcctgaattcaaatctctatctatccaagtgatacaattcatagggggctggctcctcccagaacctgtctggaggctcagaaacgggggcagtgacagtggagtcagctgctcttgggtgccagcagagccattcagtacaacccccaggctcacagcagtggcttctaggaaactgggagtttagatcagctttacagatacatcgatcagaggctaaaatgaaacctcagcctaaaactcataggactgactgcctgggaggagggttaggtctgcttcttccacttatacttagtctctgtgctccaagaggtcaaatttttgcttctagaatttccttggggtctttcagagggtgggggaacaaacccctatgcacttttcttttttttttttgagatggagtttctcttgtcaaccgggctggagtgcagtggtgcaatcttggctcactgcaacctccaccttcctggttcaagcgattctgcctcgacctctcaagtagctgggattacaagcaccagccaccatgcctggctaattttgtatttttagtagagacagggtttcaccatgttggccaggctggtctcgaatgtctgacctcaggtgatccacccgccttggcctcccaaagtgctgggattacaggcgcgagccaccgcgcccagcctacaccacttttagtaccaacactcttgggtgatttcatggaccctaaagcagacctgacactgatccagatttgcagtccatttttaaggacacctgtctttatttcctcaaagtcaagcagctttctctggaaaatgaatgctaattagtgtgaaccaaaagagtaagtaagagtctgaagtttttttaaaggagaaagcttattatggaaagtcactggtcctcccctccgcacaggaaaggtacccagtagataatgaaccaaattaagttccctccctccagccagaagttaaacatctgggatatgacgtcttcatgccaggggcactcatttcttagcagcctctctacatacatctctcaggtggtgccaagaggcacaccaggtagagcaaacttagcagctctgactaacaggctgcaaagtgcaagttcagattctgtggcagagatttggagggcacccacgtccagactgcttcccgtccaagttaccaggacagctcaaaaacatgctgacagaaaactcccatggctctaggaaaaagtgacactaagccaacacctttctttatgtgggagcaaaatcagctgatgaaggggtgggcaccattgtggggcaggcaccccactggctgcagctagcccaccataggcacagcacatcccaccactctccttccagtcctgaccaggccccagccggcaacttctaccgagagccatggctcaacaccaaactggacagtagacatcatgatccctccagttagctctaattacagaccccaccagtacagcttgacagctcccggcaccatcccttccttcatctgacttattgaacttttacaaactaacagtcaccagcaccaaagaattaagtcaactaacctgccttgaattttaaaccagcaatccatatggctttatctggtataaatcttctgcctttgatcatttctggaccgtaggaaaaaggaatagcaatcattaaaatcttgggccagagaacactatttttacataacagtttcttaacctaaagtcaaggccttggactcttccctgagggttgcctgaaattccttcatgctttctattcaggactaattcccttactgcaaatgtgttagctctaacatctcccacaagctaaaggaacttgcaagtatattaacaaggacacatctgacatcctgtgtttggttaaaatatacagcacattgtgataacataaagtggatccatcttgtatcattataggcaaaaggtatttggcaaatttttatgtatggttttatgtactgtacaagtaacttattcttgaataatgcaaattttgctataatgtacaaattgctatatgtgaattaaaaagtttccaaaatcttgaaaaaaaaaaaaaaaaaaaa

SEQ ID NO: 425 - protein, 510 aa, Homo Sapiens
MMAAAPIQQNGTHTGVPIDLDPPDSRKRPLEAPPEAGSTKRTNTGEDGQYFLKVLIPSYAAGSIIGKGGQTIVQLQKETGATIKLSKLSKSKDFYPGTTERVCLIQGTVEALNAVHGFIAEKIREMPQNVAKTEPVSILQPQTTVNPDRIKQTLPSSPTTTKSSPSDPMTTSRANQVKIIVPNSTAGLIIGKGGATVKAVMEQSGAWVQLSQKPDGINLQERVVTVSGEPEQNRKAVELIIQKIQEDPQSGSCLNISYANVTGPVANSNPTGSPYANTAEVLPTAAAAAGLLGHANLAGVAAFPAVLSGFTGNDLVAITSALNTLASYGYNLNTLGLGLSQAAATGALAAAAASANPAAAAANLLATYASEASASGSTAGGTAGTFALGSLAAATAATNGYFGAASPLAASAILGTEKSTDGSKDVVEIAVPENLVGAILGKGGKTLVEYQELTGARIQISKKGEFVPGTRNRKVTITGTPAATQAAQYLITQRITYEQGVRAANPQKVG

SEQ ID NO: 426 - DNA, 3671 bp, Homo Sapiens
gaattccgacaaaacaaaagggagaaccttctcccggtagcagcggcaggaactgcaaacatgatggcggcagctcccatccagcagaacgggacccacactggggttcccatagacctggacccgccggactcgcggaaaaggccgctggaagccccccctgaagccggcagcaccaagaggaccaatacgggcgaagacggccagtattttctaaaggttctcatacctagttatgctgctggatctataattgggaagggaggacagacaattgttcagttgcaaaaagaaactggagccaccatcaagctgtctaagctgtctaagtccaaagatttttacccaggtactactgagcgagtgtgcttgatccagggaacggttgaagcactgaatgcagttcatggattcattgcagaaaaaattcgagaaatgccccaaaatgtggccaagacagaaccagtcagcattctacaaccccagaccaccgttaatccagatcgcatcaaacaaacattgccatcttccccaactaccaccaagtcctctccatctgatcccatgaccacctccagagctaatcaggtaaagattatagttcccaacagcacagcaggtctgataatagggaagggaggtgctactgtgaaggctgtaatggagcagtcaggggcttgggtgcagctttcccagaaacctgatgggatcaacttgcaagagagggttgtcactgtgagtggagaacctgaacaaaaccgaaaagctgttgaacttatcatccagaagatacaagaggatccacaaagtggcagctgtctcaatatcagttatgccaatgtgacaggtccagtggcaaattccaatccaaccggatctccttatgcaaacactgctgaagtgttaccaactgctgcagcagctgcagggctattaggacatgctaaccttgctggcgttgcagcctttccagcagttttatctggcttcacaggcaatgacctggtggccatcacctctgcacttaatacattagccagctatggatataatctcaacactttaggtttaggtctcagtcaagcagcagcaacaggggctttggctgcagcagctgccagtgccaacccagcagcagcagcagccaatttattggccacctatgccagtgaagcctcagccagtggcagcacagctggtggtacggcggggacatttgcattaggtagcctggctgctgctactgctgcaaccaatggatattttggagctgcttctcccctagctgccagtgccattctaggaacagaaaagtccacagatggatccaaggatgtagttgaaatagcagtgccagaaaacttagttggtgcaatacttggcaaaggagggaaaacattagtggaataccaggagttgactggtgcaaggatacagatctccaaaaaaggagaattcgtacctggcacaaggaatcggaaggtaaccattactggaacaccagctgcaacacaggctgctcaatatttaattacacaaaggatcacatatgagcaaggagttcgggctgccaatcctcagaaagtgggttgagtgccccagttacacatcagattgttttaacccctcctttaccccattttcaagaaggatgtactgtactttgcagaagtgaagtttttctgttattaatatataattatgcaaatgaatgcgactatgttgacaatgtgtatatgtaaataatatgtgttttaccagatgtttcatagaaagaattttttcttgatctgttttgttctctatactttgcttgtgtatatttgtcagaggtgtttctagtgtaagatttaagcctgccattttaccagcattattgtagtttaatgattgaatgtagacagggatatgcgtatagttttcagtattagttctagataacactaaattaactactgttaggttgagtatggtggggtcagtgacctaaaatggagtgaggccaaagcactgtcctgtaagtcttacttcctgcttagggcacagtgaagtaggaaacaatattttgaaaataagttttaaatttaaaatgatcaaaaagcaatatagttgcataaaagcactgtaaaatatttaaaaggttaaaactgtggaaaattatattggtaagtttacagatcaataaaagcacctgttctccatctgaactagacaatggaaataatgctgcatgctgccatggcccattcttcatcatttgtaagttcaacaaaagttctcacatggagtcccacctcttcagaggttgcacatttgtttttaagactgaattcactactgatcccatcgcctggccgagacagtcattactccattaacatcctcactgtttagacacataactgtggtacaggattggaaattataaacaaaagtgaaagtgccaacaaattattgatagctgataatgtttcatatctgcaactgcttgataagtatgttgcattttaagagcttataattgtgtataatttgttaacactagaaacctattagtattgtgaatgtagattttactgtgaagctatctgtgatttagctgtttgctcccatgatggagtctttgcagcatggcgctagcagccaatgcagtttctaatactcggtaatttgcatgttttgtggagcatttttatgtcaccaaccagacagtatttcctgcatgcttatttagaagaggcagcttatcttgagaggtagtgttatctacctttgtcaggctttttgacaggtcatttcagagtaagcctttgttcccaagacccaacaactgtcaccctcttctgtacctctcctgagtgccaactgtccaggccatttgacacaccatctgttaacctctgagtttgcccactcaaggccactcataggggcatcctagccctgtgcactcagcactcataggatcatccagactctcatgcggcatgcagtctaatcatgacaaataatgctgctactctgatatctggctgagcaactgaattacaaaagagaattacttccatctcaacttcaacccattgattacgtccatcctagcaagctaaatggcatcccagctgctcctttctgtgcaaccaattaaagaacaatgagtgtgatgctccatgtctgaatttcgtccagcctctctctgaactgtgatctttgtcctcatgaactttcccttttgttcattgaactatatggactcttcatttcatattgatttactgtgcaatttacttttggacattgagaacttgaaattatttcctgatcccttccccttccactattaataattcatttctgtcaaactgtaagagtagactcattttttttttttttagtttttaacattggactgttatttcatttagagttctctatctctaaatatttatttagagaatgattttaaaagggaatgatatgcttgtttaaatgaaagagaaaagctgtagtaaactgtgttaattggtaatgactatttatcgtcgatactctgtagctgtgtaagttttgacaaatagtgtatctcgtggaatcagtggttagcattgccgctattatatttactcattttatcattataaatgtgtttagttcatcatgtagcatcaaaa

SEQ ID NO: 427 - protein, 917 aa, Homo Sapiens
MAFIRKKQQEQQLQLYSKERFSLLLLNLEEYYFEQHRANHILHKGSHHERKIRGSLKICSKSVIFEPDSISQPIIKIPLRDCIKIGKHGENGANRHFTKAKSGGISLIFSQVYFIKEHNVVAPYKIERGKMEYVFELDVPGKVEDVVETLLQLHRASCLDKLGDQTAMITAILQSRLARTSFDKNRFQNISEKLHMECKAEMVTPLVTNPGHVCITDTNLYFQPLNGYPKPVVQITLQDVRRIYKRRHGLMPLGLEVFCTEDDLCSDIYLKFYEPQDRDDLYFYIATYLEHHVAEHTAESYMLQWQRGHLSNYQYLLHLNNLADRSCNDLSQYPVFPWIIHDYSSSELDLSNPGTFRDLSKPVGALNKERLERLLTRYQEMPEPKFMYGSHYSSPGYVLFYLVRIAPEYMLCLQNGRFDNADRMFNSIAETWKNCLDGATDFKELIPEFYGDDVSFLVNSLKLDLGKRQGGQMVDDVELPPWASSPEDFLQKSKDALESNYVSEHLHEWIDLIFGYKQKGSDAVGAHNVFHPLTYEGGVDLNSIQDPDEKVAMLTQILEFGQTPKQLFVTPHPRRITPKFKSLSQTSSYNASMADSPGEESFEDLTEESKTLAWNNITKLQLHEHYKIHKEAVTGITVSRNGSSVFTTSQDSTLKMFSKESKMLQRSISFSNMALSSCLLLPGDATVITSSWDNNVYFYSIAFGRRQDTLMGHDDAVSKICWHDNRLYSASWDSTVKVWSGVPAEMPGTKRHHFDLLAELEHDVSVDTISLNAASTLLVSGTKEGTVNIWDLTTATLMHQIPCHSGIVCDTAFSPDSRHVLSTGTDGCLNVIDVQTGMLISSMTSDEPQTCFVWDGNSVLSGSQSGELLVWDLLGAKISERIQGHTGAVTCIWMNEQCSSIITGGEDRQIIFWKLQY

SEQ ID NO: 428 - DNA, 3380 bp, Homo Sapiens
gaattcgcctcgatggcgtttatccggaagaagcagcaggagcagcagctgcagctctactccaaggagagattttccttgctgctgcttaacttggaggagtactactttgaacagcatagagccaatcacattttgcacaagggcagtcaccatgaaaggaaaatcagaggctccttaaaaatatgttcaaaatcggtgatttttgaaccagattcaatatcccagcccatcatcaagattcctttgagagactgtataaaaataggaaagcatggagaaaatggagccaatagacacttcacaaaggcaaaatctgggggtatttcactcattttcagtcaggtatatttcattaaagaacataatgttgttgcaccatataaaatagaaaggggcaaaatggaatatgtttttgaattggatgttcccgggaaagtggaagatgttgtggagacgttgcttcagcttcacagagcatcctgccttgacaaattgggtgaccaaaccgccatgataacagctattttgcagtctcgtttagctagaacatcatttgacaaaaacaggttccaaaacatttctgaaaagctgcacatggaatgcaaagcagaaatggtgacgcctctggtgactaatcctggacacgtgtgcatcacggacacaaacctgtattttcagcccctcaacggctacccgaaacctgtggtccagataacactccaagatgtccgccgcatctacaaaaggaggcacggcctcatgcctctgggcttggaagtattttgcacagaagatgatctgtgttccgacatctacctaaagttctatgaacctcaagatagagatgatctctatttttacattgccacatacctagagcaccatgtggcggagcacactgctgagagctacatgctgcagtggcagcgtggacacctttccaactatcagtacctccttcacctcaacaacctggccgaccgcagctgcaacgacctctcccagtaccctgtgtttccatggataatacatgattattccagctcagaactagatttgtcaaatccaggaaccttccgggatctcagtaagccagtaggggccctaaataaggaacggctggagagactactgacacgctaccaggaaatgcctgaaccaaagttcatgtatgggagtcactactcttccccgggttatgtacttttttatcttgttaggattgcaccagagtatatgctgtgcctgcagaatggaagatttgataatgcagatagaatgttcaacagtattgcagaaacttggaaaaactgtctggatggtgcaacggattttaaagagttaattccagaattctatggtgatgatgtgagctttctagtcaatagcctgaagttggatttgggaaagagacaaggaggacagatggttgacgacgtggagcttcccccttgggcttccagtcccgaggactttctccagaagagcaaagatgcattggaaagcaattatgtgtctgaacaccttcacgagtggattgatctaatatttggctacaaacaaaaagggagtgatgcagttggggcccataatgtatttcatcccctgacctatgaaggaggtgtagacttgaacagcatccaggatcctgatgagaaggtagccatgcttacgcaaatcttggaatttgggcagacaccaaaacaactatttgtgacaccacatcctcgaaggatcaccccaaagtttaaaagtttgtcccagacctccagttataatgcttctatggcagattccccaggtgaagagtcttttgaagacctgaccgaagaaagcaaaacactggcctggaataacatcaccaaactgcagttacacgagcactataaaatccacaaagaagcagttactggaatcacggtctctcgcaatggatcttcagtattcacaacatcccaagattccaccttgaagatgttttctaaagaatcaaaaatgctacaaagaagtatatcattttcaaatatggctttatcgtcttgtttacttttaccaggagatgccactgtcataacttcttcatgggataataatgtctatttttattccatagcatttggaagacgccaggacacgttaatgggacatgatgatgctgttagtaagatctgttggcatgacaacaggctatattctgcatcgtgggactctacagtgaaggtgtggtctggtgttcctgcagagatgccaggcaccaaaagacaccactttgacttgctggccgagctggaacatgatgtcagtgtagatacaatcagtttaaatgctgcaagcacactgttagtttccggcaccaaagaaggcacagtgaatatttgggacctcacaacggccaccttaatgcaccagattccatgccattcagggattgtatgtgacactgcttttagcccagatagtcgccatgtcctcagcacaggaacagatggctgtcttaatgtcattgatgtgcagacaggaatgctcatctcctccatgacatcagatgagccccagacgtgctttgtctgggatggaaattccgttttatctggcagtcagtctggtgaactgctcgtttgggacctccttggagcaaaaatcagtgagagaatacagggccacacaggtgctgtgacatgtatatggatgaatgaacagtgtagcagtatcatcacaggaggggaagacagacaaattatattctggaaattgcagtattaagtgccttttcctctcctgaatattaaattgaactctatttaatgcatttttaaaccaaacttttaaacggactggtgaatgtgcaatgttagtaattagaagttttaccacatggaaaatttgtggttttaaactttctaaatcatggtgacttcattgaaagccattagttgccattctcttagggcagataaaatgcggctgtgttaggaaaaacatgttacactgtaaggcagatgatcgtccccgtatgatgattgtcagaagacaggactaagtagcagagaatagctaagagataaattgggctggggaaacttgtcagaaagcactgaacaattaagaaattttccaagaaaatgtgcagtattctctgctacttctgaatctgttttgtcttcctaatctatcacaattgccacccatcgggttttgggtgtgtgttttcatagcgtggttactttctataatgctgtacccagattctaagaacctggagaaggattagcagttcttagtaagtttactgtgtataggaacggtttgtatttcattacagctattcatcttttctacattaaaaatatttttctctaaaaaaaaaaaaaaaaaaa

SEQ ID NO: 429 - protein, 207 aa, Homo Sapiens
MLALRCGSRWLGLLSVPRSVPLRLPAARACSKGSGDPSSSSSSGNPLVYLDVDANGKPLGRVVLELKADVVPKTAENFRALCTGEKGFGYKGSTFHRVIPSFMCQAGDFTNHNGTGGKSIYGSRFPDENFTLKHVGPGVLSMANAGPNTNGSQFFICTIKTDWLDGKHVVFGHVKEGMDVVKKIESFGSKSGRTSKKIVITDCGQLS

SEQ ID NO: 430 - DNA, 865 bp, Homo Sapiens
gaattccggagttccgggcgcgcgcgacgtcagtttgagttctgtgttctccccgcccgtgtcccgcccgacccgcgcccgcgatgctggcgctgcgctgcggctcccgctggctcggcctgctctccgtcccgcgctccgtgccgctgcgcctccccgcggcccgcgcctgcagcaagggctccggcgacccgtcctcttcctcctcctccgggaacccgctcgtgtacctggacgtggacgccaacgggaagccgctcggccgcgtggtgctggagctgaaggcagatgtcgtcccaaagacagctgagaacttcagagccctgtgcactggtgagaagggcttcggctacaaaggctccaccttccacagggtgatcccttccttcatgtgccaggcgggcgacttcaccaaccacaatggcacaggcgggaagtccatctacggaagccgctttcctgacgagaactttacactgaagcacgtggggccaggtgtcctgtccatggctaatgctggtcctaacaccaacggctcccagttcttcatctgcaccataaagacagactggttggatggcaagcatgttgtgttcggtcacgtcaaagagggcatggacgtcgtgaagaaaatagaatctttcggctctaagagtgggaggacatccaagaagattgtcatcacagactgtggccagttgagctaatctgtggccagggtgctggcatggtggcagctgcaaatgtccatgcacccaggtggccgcgttgggctgtcagccaaggtgcctgaaacgatacgtgtgcccactccactgtcacagtgtgcctgaggaaggctgctagggatgttagacggaattcc

SEQ ID NO: 431 - protein, 350 aa, Homo Sapiens
MEPKRIREGYLVKKGSVFNTWKPMWVVLLEDGIEFYKKKSDNSPKGMIPLKGSTLTSPCQDFGKRMFVFKITTTKQQDHFFQAAFLEERDAWVRDINKAIKCIEGGQKFARKSTRRSIRLPETIDLGALYLSMKDTEKGIKELNLEKDKKIFNHCFTGNCVIDWLVSNQSVRNRQEGLMIASSLLNEGYLQPAGDMSKSAVDGTAENPFLDNPDAFYYFPDSGFFCEENSSDDDVILKEEFRGVIIKQGCLLKQGHRRKNWKVRKFILREDPAYLHYYDPAGAEDPLGAIHLRGCVVTSVESNSNGRKSEEENLFEIITADEVHYFLQAATPKERTEWIKAIQMASRTGK

SEQ ID NO: 432 - DNA, 2745 bp, Homo Sapiens
ggcccagctgctgagaggagttgcctgagagtgacctttgcatctgcctgtccagccagcatggaaccaaagcggatcagagagggctaccttgtgaagaaggggagcgtgttcaatacgtggaaacccatgtgggttgtattgttagaagatggaattgaattctataagaagaaaagtgacaacagccccaaaggaatgatcccgctgaaagggagcactctgactagcccttgtcaagactttggcaaaaggatgtttgtgtttaagatcactacgaccaaacagcaggaccacttcttccaggcagccttcctggaggagagagatgcctgggttcgggatatcaataaggccattaaatgcattgaaggaggccagaaatttgccaggaaatctaccaggaggtccattcgactgccagaaaccattgacttaggtgccttatatttgtccatgaaagacactgaaaaaggaataaaagaactgaatctagagaaggacaagaagatttttaatcactgcttcacaggtaactgcgtcattgattggctggtatccaaccagtctgttaggaatcgccaggaaggcctcatgattgcttcatcgctgctcaatgaggggtatctgcagcctgctggagacatgtccaagagtgcagtggatggaactgctgaaaaccctttcctggacaaccctgatgccttctactactttccagacagtgggttcttctgtgaagagaattccagtgatgatgatgtgattctgaaagaagaattcagaggggtcattatcaagcagggatgtttactgaagcaggggcatagaaggaaaaactggaaagtgaggaagttcatcttgagagaagaccctgcctacctgcactactatgaccctgctggggcagaagatcccctgggagcaattcacttgagaggctgtgtggtgacttcagtggagagcaactcaaatggcaggaagagtgaggaagagaacctttttgagatcatcacagcagatgaagtgcactatttcttgcaagcagccacccccaaggagcgcacagagtggatcaaagccatccagatggcctcccgaactgggaagtaaagagactcctgcattcctcctcccctcctgagggaagcccatggacaagctcagtccaggacctgtccacttctgtgacaaatcaacgggaaacagcccaggggtgggaagttttcatttgcaggggggtctgaatgtaactcaccatgtggtgtgcaaggttcccctgcattgtattgctcactgcagcccctctgcccctatccatgacccccaagcagatataacaagctgtgcagcctcagtaggctgcttgccctctccagcctcagggcctcttctggaaaatgaagaaattcaactagtagattcctgaggtccccctagcttaaaaaaaaaaaaatctgccccatgattctaacactcgcagtagtgatagtgtatctagttgttctgctggtgtccttccttggctaagtcttggccttcagttatcttcaaatgtaccagaacctgagccaacgcctccctgtgaaactgttgctgatctgtagtacagtaccaggaagaaacctcttttgttctctttagacatcttctacttgctcttggccttgagatcgtgtaacaaaatgaaggagggctctcttctttcttcctcatcctactcaaaaacttcccgagagcagtggtggttttgagggttttgacttctattacttttggcagcctggaaagttgtgtcttctgggaaagagacccggggaggccaggagtagctgagggtcctttctgtgcccttaaaccgcccagaggagccctattccactctggttttaggctgatctgagagggtctccctttgttcctttctggagcatttctctaacgtttattacaattaggagggggaccccacatctgtgagattctgtttcatttgaggtttacagaaaaaaaaaagtggccagatgtgttccccccatgggtgagaggcctgggcaactgcctggtgaatgtgtcttgcggcagctgcagcaagtggaggggctgaactactggccagctcactggatgatgggttaatacaacaactgcactgtaaggactcagagccacacagaacttctgagaggggctgttagcattgcgcagcatcttcagttctccagtaaatgatattgcgttcgtgcctcagctttaagcacaagtagcagcagctcctgcttgagttctgagggcatcatggccctatgattaaccagagtgatctaacctagactaaaattgggaacttatttgcaatttttgaccctgaccactaactagtgattcttctccaaaattgagaaagacagcacccattgaaacagatatgtgtgtgaaagtatatttttcaattccagatttttaattttaaggctccaggaaagaaaggagagtagaacatttttcctcattttatcaaatcctctcttgccctccctcaattcccctgtaacattcctgaagctgttcccactcccagatggttttatcaatagcctagaggtaaagaactgtctttttctctgattctttaataaattatctttatagaatatgcacaagtttttctacactcagtgttaaagtatttattaatgggaagtcaacttaatgttttgaaataaatatatgactctgtttaat

SEQ ID NO: 433 - protein, 240 aa, Homo Sapiens
MLLQSQTMGVSHSFTPKGITIPQREKPGHMYQNEDYLQNGLPTETTVLGTVQILCCLLISSLGAILVFAPYPSHFNPAISTTLMSGYPFLGALCFGITGSLSIISGKQSTKPFDLSSLTSNAVSSVTAGAGLFLLADSMVALRTASQHCGSEMDYLSSLPYSEYYYPIYEIKDCLLTSVSLTGVLVVMLIFTVLELLLAAYSSVFWWKQLYSNNPGSSFSSTQSQDHIQQVKKSSSRSWI

SEQ ID NO: 434 - DNA, 1066 bp, Homo Sapiens
aagtctcagaggctggagagcagagcaccaagatcgttctggcaggaacagccagtgggaggttccagctgagcgctccccagaggtgagctgatccccagccacagcacacaggaccaggctgcgagaacagcatcatcagcatcatgctattacaatcccaaaccatgggggtttctcacagctttacaccaaagggcatcactatccctcaaagagagaaacctggacacatgtaccaaaacgaagattacctgcagaacgggctgccaacagaaaccaccgttcttgggacagtccagatcctgtgttgcctgttgatttcaagtctgggggccatcttggtttttgctccctacccctcccacttcaatccagcaatttccaccactttgatgtctgggtacccatttttaggagctctgtgttttggcattactggatccctctcaattatctctggaaaacaatcaactaagccctttgacctgagcagcttgacctcaaatgcagtgagttctgttactgcaggagcaggcctcttcctccttgctgacagcatggtagccctgaggactgcctctcaacattgtggctcagaaatggattatctatcctcattgccttattcggagtactattatccaatatatgaaatcaaagattgtctcctgaccagtgtcagtttaacaggtgtcctagtggtgatgctcatcttcactgtgctggagctcttattagctgcatacagttctgtcttttggtggaaacagctctactccaacaaccctgggagttcattttcctcgacccagtcacaagatcatatccaacaggtcaaaaagagttcttcacggtcttggatataagtaactcttggcctcagaggaaggaaaagcaactcaacactcatggtcaagtgtgattagactttcctgaaatctctgccattttagatactgtgaaacaaactaaaaaaaaaaaagcttttgttttgtatttgtttactatgagtcgttatttaatttctcttgaaaataatttcctcaaagcccaagtcaataaa

SEQ ID NO: 435 - protein, 106 aa, Homo Sapiens
MVNVPKTRRTFCKKCGKHQPHKVTQYKKGKDSLYAQGRRRYDRKQSGYGGQTKPIFRKKAKTTKKIVLRLECVEPNCRSKRMLAIKRCKHFELGGDKKRKGQVIQF

SEQ ID NO: 436 - DNA, 537 bp, Homo Sapiens
ggcgagagctgcgaaaggcgagagctgcgaagggccaggtgtcgggcgctgtttctcgttttcatcatatagacaaaacagccctgctgcaaagatggtcaacgtacctaaaacccgaagaaccttctgtaagaagtgtggcaagcatcagcctcacaaagtgacacagtataagaagggcaaggattctttgtatgcccagggaaggaggcgctatgatcggaagcagagtggctatggtgggcagacaaagccaattttccggaagaaggctaagaccacaaagaagattgtgctaaggctggaatgtgttgagcctaactgcagatccaagaggatgctggccattaagagatgcaagcattttgaactgggaggagataagaagagaaagggccaagtgatccagttctaaactttgggatatttttcttcaattttgaagagaaaatggtgaagccatagaaaagttacccgagggaaaataaatacagtgatattcttacgcaaaaaaaaaaaaaaaaaaaaaaaaaaaaa

SEQ ID NO: 437 - protein, 599 aa, Homo Sapiens
MATNGSKVADGQISTEVSEAPVANDKPKTLVVKVQKKAADLPDRDTWKGRFDFLMSCVGYAIGLGNVWRFPYLCGKNGGGAFLIPYFLTLIFAGVPLFLLECSLGQYTSIGGLGVWKLAPMFKGVGLAAAVLSFWLNIYYIVIISWAIYYLYNSFTTTLPWKQCDNPWNTDRCFSNYSMVNTTNMTSAVVEFWERNMHQMTDGLDKPGQIRWPLAITLAIAWILVYFCIWKGVGWTGKVVYFSATYPYIMLIILFFRGVTLPGAKEGILFYITPNFRKLSDSEVWLDAATQIFFSYGLGLGSLIALGSYNSFHNNVYRDSIIVCCINSCTSMFAGFVIFSIVGFMAHVTKRSIADVAASGPGLAFLAYPEAVTQLPISPLWAILFFSMLLMLGIDSQFCTVEGFITALVDEYPRLLRNRRELFIAAVCIISYLIGLSNITQGGIYVFKLFDYYSASGMSLLFLVFFECVSISWFYGVNRFYDNIQEMVGSRPCIWWKLCWSFFTPIIVAGVFIFSAVQMTPLTMGNYVFPKWGQGVGWLMALSSMVLIPGYMAYMFLALKGSLKQRIQVMVQPSEDTVRPENGPEHAQAGSSTSKEAYI

SEQ ID NO: 438 - DNA, 2298 bp, Homo Sapiens
gaattccgctccggccgcaggatctccccaaggtggcagaaggaggccttctggagctgacccacccccgacgaccatcagggtgaggcaactccaaggtcctactctctttctgtgcctgttacccaccccgtcctcctagggtgcccttgagccgcaaaactgctgtccacgtggaccgggggtgacatcgcacgtccatctgccaggacccctgcgtccaaattccgagacatggcgaccaacggcagcaaggtggccgacgggcagatctccaccgaggtcagcgaggcccctgtggccaatgacaagcccaaaaccttggtggtcaaggtgcagaagaaggcggcagacctccccgaccgggacacgtggaagggccgcttcgacttcctcatgtcctgtgtgggctatgccatcggcctgggcaacgtctggaggttcccctatctctgcgggaaaaatggtgggggagccttcctgatcccctatttcctgacactcatctttgcgggggtcccactcttcctgctggagtgctccctgggccagtacacctccatcggggggctaggggtatggaagctggctcctatgttcaagggcgtgggccttgcggctgctgtgctatcattctggctgaacatctactacatcgtcatcatctcctgggccatttactacctgtacaactccttcaccacgacactgccgtggaaacagtgcgacaacccctggaacacagaccgctgcttctccaactacagcatggtcaacactaccaacatgaccagcgctgtggtggagttctgggagcgcaacatgcatcagatgacggacgggctggataagccaggtcagatccgctggccactggccatcacgctggccatcgcctggatccttgtgtatttctgtatctggaagggtgttggctggactggaaaggtggtctacttttcagccacatacccctacatcatgctgatcatcctgttcttccgtggagtgacgctgcccggggccaaggagggcatcctcttctacatcacacccaacttccgcaagctgtctgactccgaggtgtggctggatgcggcaacccagatcttcttctcatacgggctgggcctggggtccctgatcgctctcgggagctacaactctttccacaacaatgtctacagggactccatcatcgtctgctgcatcaattcgtgcaccagcatgttcgcaggattcgtcatcttctccatcgtgggcttcatggcccatgtcaccaagaggtccattgctgatgtggccgcctcaggccccgggctggcgttcctggcatacccagaggcggtgacccagctgcctatctccccactctgggccatcctcttcttctccatgctgttgatgctgggcattgacagccagttctgcactgtggagggcttcatcacagccctggtggatgagtaccccaggctcctccgcaaccgcagagagctcttcattgctgctgtctgcatcatctcctacctgatcggtctctctaacatcactcaggggggtatttatgtcttcaaactctttgactactactctgccagtggcatgagcctgctgttcctcgtgttctttgaatgtgtctctatttcctggttttacggtgtcaaccgattctatgacaatatccaagagatggttggatccaggccctgcatctggtggaaactctgctggtctttcttcacaccaatcattgtggcgggcgtgttcattttcagtgctgtgcagatgacgccactcaccatgggaaactatgttttccccaagtggggccagggtgtgggctggctgatggctctgtcttccatggtcctcatccccgggtacatggcctacatgttcctcgccctaaagggctccctgaagcagcgcatccaagtcatggtccagcccagcgaagacactgttcgcccagagaatggtcctgagcacgcccaggcgggcagctccaccagcaaggaggcctacatctagggtgggggccactcaccgacccgacactctcaccccccgacctggctgagtgcgaccaccacttgatgtctgaggataccttccatctcaacctacctcgagtggtgatccagacaccatcaccacgcagagaggggaggtgggaggacagttagacccctgggtgggccctgccgtgggcaaggatacccggtggcttctggcactggcgggctggtgacctttttaatccaggccccatcagcatcccactcctggcgggat

SEQ ID NO: 439 - protein, 903 aa, Homo Sapiens
MEGYSEEASLLRHLEKVASEEEEVPLVVYLKENAALLTANGLHLSQNREAQQSSPAPPPAEVHSPAADVNQNLASPSATLTTPTSNSSHNPPATDVNQNPPATVVPQSLPLSSIQQNSSEAQLPSNGTGPASKPSTLCADGQPQAPAEEVRCSTLLIDKVSTPATTTSTFSREATLIPSSRPPASDFMSSSLLIDIQPNTLVVSADQEMSGRAAATTPTKVYSEVHFTLAKPPSVVNRTARPFGIQAPGGTSQMERSPMLERRHFGEKAPAPQPPSLPDRSPRPQRHIMSRSPMVERRMMGQRSPASERRPLGNFTAPPTYTETLSTAPLASWVRSPPSYSVLYPSSDPKSSHLKGQAVPASKTGILEESMARRGSRKSMFTFVEKPKVTPNPDLLDLVQTADEKRRQRDQGEVGVEEEPFALGAEASNFQQEPAPRDRASPAAAEEVVPEWASCLKSPRIQAKPKPKPNQNLSEASGKGAELYARRQSRMEKYVIESSSHTPELARCPSPTMSLPSSWKYPTNAPGAFRVASRSPARTPPASLYHGYLPENGVLRPEPTKQPPYQLRPSLFVLSPIKEPAKVSPRAASPAKPSSLDLVPNLPKGALPPSPALPRPSRSSPGLYTSPGQDSLQPTAVSPPYGGDISPVSPSRAWSPRAKQAPRPSFSTRNAGIEAQDRRESLPTSPPWTPGASRPPSSLDGWVSPGPWEPGRGSSMSSPPPLPPPPPMSPSWSERSVSPLRPETEARPPSRQLQALLARNIINAARRKSASPRSAGAENPRPFSPPRAPPPPPPPPPPPPRMRSPQPARPGSAAVPGAAFAPIPRSPLPAGPSSCTSPRSPLPAPPRPFLYRRSPTDSDVSLDSEDSGAKSPGILGYNICPRGWNGSLRLKRGSLPAEASCTT

SEQ ID NO: 440 - DNA, 5332 bp, Homo Sapiens
gagaaaagtcacatccagctccttcatgttgctgccgatgtgggattttcctggcttcgtcagccaagcaattggctgcctttgccggaggctttgagaaccaaggcttgaaggccggcaggagcatccagggggaagcttggcttcagggaggacctagcagacgttgggccggagcactagcctcacggagaaggatctgaaagaagccaaggcgcggagccagcagattgcagcccagctgaccacccctcccagctccaattcccgtggcgtccagctcttcaacaggcgccggcagagggtgaacgagttcaccttggagagccacggccagaggggacagaagcccagccaggagtccctcagagtgctcccttcaagcctcccaggccatgcaccggggctcagcctgagttccacctcgctgccggagccaggccctccacggcaccccagtccccagagccccgacagaggggtccctggccacagcatggaggggtactcagaggaggctagcttgctgcggcacctggagaaggtggccagtgaggaggaagaggtaccactggtggtttatctaaaggagaatgcagcactgctgacagccaatgggctgcacctgtcccaaaaccgagaggcccagcagtcctcaccggccccacctccagctgaggtccacagcccagctgcagatgtcaaccaaaaccttgcctcgcccagtgccacgctcaccacaccaacttctaacagcagccacaatccgccagccaccgatgtcaatcagaacccaccggcaactgttgtcccacagagcctgccactttctagcatccaacagaattcctcagaggcccaactcccatctaatggcacagggcctgcttccaaacccagcaccctgtgtgctgatgggcaaccccaggcaccggctgaggaggtgagatgcagcacactcctaattgacaaggtatcaactccagctaccaccaccagcaccttctccagagaagctacgctcatccccagctccaggcccccagcctcagatttcatgtccagctccctgctcattgacatccagcccaacaccctagtggtgtcagcagatcaagagatgtctgggcgagcagctgccaccacgcccaccaaggtctacagtgaggtccacttcacactggccaagcccccatcagtggtcaacaggacggccaggccttttgggatccaggcgccagggggcaccagccagatggagaggagccccatgctagagagacgacattttggggagaaggccccggctccccagccccccagtttgccagacaggagcccccggccacagagacacataatgtcccgcagccccatggtggaaaggaggatgatggggcagcgaagcccggcctcagagagacgccccttggggaacttcactgcaccccccacctacactgagaccttgtccacagcccctctggcttcctgggtgaggtctcctccctcatattctgtcctgtatcccagctccgaccccaagtcttctcatctgaagggccaggcggttcctgccagcaagacgggcattctggaggagtcgatggcccgccggggcagccgcaaatccatgtttactttcgtggagaagcccaaggtgaccccgaatccagacttgctggatctggtacagacagcggatgagaagcggcggcagagggaccagggggaggtaggcgtggaggaggagcccttcgcactgggggccgaggcctccaacttccagcaggagccagcacctcgtgacagggccagccccgcggcggcggaggaggtggtaccagagtgggcctcctgcctcaagtcaccccgcatccaggccaagccgaagcccaaacccaaccagaacctctccgaggcctctgggaagggagctgagctctacgcccgccgccagtcacggatggagaaatatgtcatcgagtcttcaagccacacgccagagctggcccgctgcccatcacctaccatgtccctgccttcctcctggaaataccccactaacgcccccggggccttccgagtggcatcccgaagcccagcccggaccccgcctgcctccctctaccatggctacctgcctgagaacggggtcctgcgcccagagcccaccaagcagccgccataccagctgcgcccctcgctctttgtcctctcacctatcaaggagcctgccaaggtctcaccaagagctgcctcgcccgccaagcccagctccttggacctggtgcccaacctgcccaagggggctctccctccatctcctgccctgcctcggccctcgcgctcctcaccgggcctctacacctcccccggccaggacagcctgcagcccactgccgtgagccctccttacggcggtgacatctcccccgtgtctccctccagggcgtggtctccccgagccaagcaggcccccaggccctccttctctacccggaacgccgggatcgaggctcaggaccgccgggagagcctgcccacctccccaccctggacgccgggcgcgtcccggccccccagcagcctagacggctgggtgagcccgggcccgtgggagccaggtcgcgggagcagcatgagcagccccccgccgctgccgccgccaccgcccatgtctccctcgtggagcgagcgctcggtgtccccgctgcgacctgagaccgaggcgcggccccccagccgccagctgcaggcgcttctggcgcgaaacatcatcaatgcggcccggcgcaagagcgcctccccgcggtcggcgggcgccgagaacccgcggcccttctccccgccgagggcgccaccgcccccgcccccgcccccgcccccgcccccgcgcatgcgctcgccacagcccgcccgccccggctcggctgctgtgccgggggcagccttcgcgcccatcccgcggagcccgttgcccgccggtccttcgtcctgcaccagtccccggagcccgctgcccgcgcctcccaggcccttcctctaccgccgctcgcccacggactccgacgtgtccctcgactccgaggactccggggctaagtctccaggcatcctgggctacaatatctgtccccgcgggtggaatggcagccttcggctcaagcgtggcagcctccccgccgaggcctcctgcaccacctagagccccacccccgaccccaccccgggagggcagagccagaagaaggctcattagacctgggggacccaaagggtctggcctctttgggcagccccagagatgaggggtcagcagaggagagctctggggttggggatgggttagggacgcaagcttgagttctagcccttgctctcattcagctgttgtgtgaccctgggtaagacccttccttgtttgaccctcagctttcccatctgtttaatggtggctttggccaaggcaatccacaaacgtcaaaattccccttcccatcagtacacacaccgatgcacacacactctctctttctctctctctctctctcacacacacacacacacacacacacacacacacacacacacacacacactagttagtgccttggatgaggcggggcagtgtgtatatggacccctggacttgctaccttcagggttccatactcgtccctcccctcctggctctgctgtctggagtctggcaagcggggtgtgttcagaaggtcctaggcctgtgtcgcatgtccaggcactggcctgaccatccggctccctggcaccaagtcccaggcaggagcagctgttttccatcccttcccagacaagctctatttttatcacaatgacctttagagaggtctcccaggccagctcaaggtgtcccactatcccctctggagggaagaggcaggaaaattctccccgggtccctgtcatgctactttctccatcccagttcagactgtccaggacatcttatctgcagccataagagaattataaggcagtgatttcccttaggcccaggacttgggcctccagctcatctgttccttctgggcccattcatggcaggttctgggctcaaagctgaactggggagagaagagatacagagctaccatgtgactttacctgattgccctcagtttggggttgcttattgggaaagagagagacaaagagttacttgttacgggaaatatgaaaagcatggccaggatgcatagaggagattctagcaggggacaggattggctcagatgacccctgagggctcttccagtcttgaaatgcattccatgatattaggaagtcgggggtgggtggtggtggtgggctagttgggcttgaatttaggggccgatgagcttgggtacgtgagcagggtgttaagttagggtctgcctgtatttctggtccccttggaaatgtccccttcttcagtgtcagacctcagtcccagtgtccatatcgtgcccagaaaagtagacattatcctgccccatcccttccccagtgcactctgacctagctagtgcctggtgcccagtgacctgggggagcctggctgcaggccctcactggttccctaaaccttggtggctgtgattcaggtccccaggggggactcagggaggaatatggctgagttctgtagtttccagagttggctggtagagccttctagaggttcagaatattagcttcaggatcagctgggggtatggaattggctgaggatcaaacgtatgtaggtgaaaggataccaggatgttgctaaaggtgagggacagtttgggtttgggacttaccggggtgatgttagatctggaacccccaagtgaggctggagggagttaaggtcagtatggaagatagggttgggacagggtgctttggaatgaaagagtgaccttagagggctccttgggcctcaggaatgctcctgctgctgtgaagatgagaaggtgctcttactcagttaatgatgagtgactatatttaccaaagcccctacctgctgctgggtcccttgtagcacaggagactggggctaagggcccctcccagggaagggacaccatcaggcctctggctgaggcagtagcatagaggatccatttctacctgcatttcccagaggactagcaggaggcagccttgagaaaccggcagttcccaagccagcgcctggctgttctctcattgtcactgccctctccccaacctctcctctaacccactagagattgcctgtgtcctgcctcttgcctcttgtagaatgcagctctggccctcaataaatgcttcctgcatt

SEQ ID NO: 441 - protein, 221 aa, Homo Sapiens
MFGFHKPKMYRSIEGCCICRAKSSSSRFTDSKRYEKDFQSCFGLHETRSGDICNACVLLVKRWKKLPAGSKKNWNHVVDARAGPSLKTTLKPKKVKTLSGNRIKSNQISKLQKEFKRHNSDAHSTTSSASPAQSPCYSNQSDDGSDTEMASGSNRTPVFSFLDLTYWKRQKICCGIIYKGRFGEVLIDTHLFKPCCSNKKAAAEKPEEQGPEPLPISTQEW

SEQ ID NO: 442 - DNA, 3097 bp, Homo Sapiens
agactatctttctagacaaggcagttgaggaggagggagcgcttgagggggactggcctggcgtgcactccgcacctcggggacattattgcgcgtggaacggctgcttttggaaggcacaacttcctgaatggaccatgactcccaccaaagatccctgtctctgattcaccaaacagcttcaaccctgaaaccaggacgagaagttgacaacatctgagtggacagctaattgacctaagacttcagaccagactattgcccagaagaaaagatgtttggttttcacaagccaaagatgtaccgaagtatagagggctgctgtatttgcagagctaagtcctccagttctcgattcactgacagtaaacgctatgaaaaggacttccagagctgttttggattgcatgagactcgttcaggagacatctgcaatgcctgtgtcctgcttgtgaaaagatggaagaagttgccagcaggatcaaaaaaaaactggaatcatgtggtagatgcaagggctggacccagtctaaagactacattgaaaccaaagaaagtgaaaactctatctgggaacaggataaaaagcaaccagatcagtaaactgcagaaggaatttaaacgtcataattctgatgctcacagtaccacctcaagtgcctccccagctcaatctccttgttacagtaaccagtcagatgacggctcagatacagagatggcttctggttctaacagaacaccagttttttcctttttagatctcacttactggaaaagacagaagatatgttgtgggatcatctataaaggccgttttggggaagtcctcattgacacacatctcttcaagccttgctgcagcaataagaaagcagctgctgagaagccagaggagcaggggccagagcctctgcccatctccactcaggagtggtgactgaggtttttatgtagaaggggaacaaaaaaaaaaatctgaattttgaaaaaccacaaagctacaaactgaccctctttttttttttttttttttgagacggagttttgctcttgttacccaggctggagtgcagtggcgtgatcttggctcactgcaacttccgtctcccgggttcaagtgattctcctgcctcagcctcccaagtagctgggtttataggtgcccgccaccagacccggctaattttttagttttagtagagacggggtttcaccacgttggccaggctggtcttaaatgaccctcttatttttaacttggatacctgctattctgccaaaagacaatttctagagtagttttgaatgggttgatttcccccactcccacaaactctgaagccagtgtctagcttactaaaaaaagagttgtatataatatttaagatgctgagtatttcataggaaagctgaatgctgctgtaaagtgctctttaagtctttttttttttaatccccttctaatgaatgaaactaggggaatttcaggggacagagatgggatttgttgtatgataaactgtatgtagtttttagtctttctgttttgagaagcagtggttggggcatttttaagatggctggctactcttgttttccctcatgataataaatttgtcataactcagtaacatgaacttgcccctagaggtagttgttaataattttgaaatattaaggtcttgccaagcttctgatgattcacacctgtactactgattattaagcaggacagactgagctttctgttgcaaataccttggaggagaaagtaatttctaaatatacagagaggtaacttgactatatatgttgcatcctgtgcctcccttcatattaatatttgataaagattttaatttatgtaaaacttctaaagcagaatcaaagctcctcttggggaaatggcaagtctttaggataggcaagaccctgtatgaatagtaccaaagcattaccgcatggtagagaacacactcgattaaaaatgttaagctatctgaaaaataaaatgtgcaagtcttcaggatggcacaaaacaaaggttaatgcttcttggggcacatttcttagagggcttgctgagtgtgtaaatataatcgacttttgtttgtgttacatgacttctgtgacttcattgaaaatctgcacaattcagtttcagctctggattacttcagttgacctttgtgaaggtttttatctgtgtagaatgggtgtttgacttgttttagcctattaaatttttattttctttcactctgtattaaaagtaaaacttactaaaagaaaagaggtttgtgttcacattaaatggttttggtttggcttcttttagtcaggctttctgaacattgagatatcctgaacttagagctcttcaatcctaagattttcatgaaaagcctctcacttgaacccaaaccagagtactcttactgcctcttttctaaatgttcaggaaaagcattgccagttcagtcttttcaaaatgagggagaaacatttgcctgccttgtaataacaagactcagtgcttattttttaaactgcattttaaaaattggatagtataataacaataaggagtaagccaccttttataggcaccctgtagttttatagttcttaatctaaacattttatatttccttcttttggaaaaaacctacatgctacaagccaccatatgcacagactatacagtgagttgagttggctctcccacagtctttgaggtgaattacaaaagtccagccattatcatcctcctgagttatttgaaatgattttttttgtacattttggctgcagtattggtggtagaatatactataatatggatcatctctacttctgtatttatttatttattactagacctcaaccacagtcttctttttccccttccacctctctttgcctgtaggatgtactgtatgtagtcatgcactttgtattaatatattagaaatctacagatctgttttgtactttttatactgttggatacttataatcaaaacttttactagggtattgaataaatctagtcttactagaaaaaaaaaaaaaagaaaaaaaaaaaaaaaaa

SEQ ID NO: 443 - protein, 144 aa, Homo Sapiens
MKSQWCRPVAMDLGVYQLRHFSISFLSSLLGTENASVRLDNSSSGASVVAIDNKIEQAMDLVKSHLMYAVREEVEVLKEQIKELIEKNSQLEQENNLLKTLASPEQLAQFQAQLQTGSPPATTQPQGTTQPPAQPASQGSGPTA

SEQ ID NO: 444 - DNA, 1725 bp, Homo Sapiens
cgcctcttcacggcactgggatccgcatctgcctgggatcatcaagccctagaagctgggtttctttaaattagggctgccgttttctgtttctccctgggctgcggaaagccagaagattttatctagcttatacaaggctgctggtgttccctctttttttccacgagggtgtttttggctgcaattgcatgaaatcccaatggtgtagaccagtggcgatggatctaggagtttaccaactgagacatttttcaatttctttcttgtcatccttgctggggactgaaaacgcttctgtgagacttgataatagctcctctggtgcaagtgtggtagctattgacaacaaaatcgagcaagctatggatctagtgaaaagccatttgatgtatgcggtcagagaagaagtggaggtcctcaaagagcaaatcaaagaactaatagagaaaaattcccagctggagcaggagaacaatctgctgaagacactggccagtcctgagcagcttgcccagtttcaggcccagctgcagactggctccccccctgccaccacccagccacagggcaccacacagccccccgcccagccagcatcgcagggctcaggaccaaccgcatagctgcctatgcccccgcagaactggctgctgcgtgtgaactgaacagacggagaagatgtgctagggagaatctgcctccacagtcacccatttcattgctcgctgcgaaagagacgtgagactgacatatgccattatctcttttccagtattaaacactcatatgcttatggcttggagaaatttcttagttgggtgaattaaaggttaatccgagaattagcatggatataccgggacctcatgcagcttggcagatatctgagaaatggtttaattcatgctcaggagctgtgtgcctttccatcccttccggctccctacccctcacttccaagggttctctctcctgcttgcgcttagtgtcctacatggggttgtgaagcgatggagctcctcactggactcgcctctctcctctcctccccccaggaggaacttgaaaggagggtaaaaagactaaaatgagggggaacagagttcactgtacaaatttgacaactgtcaccaaaattcataaaaaacaatagtactgtgcctctttcttctcaaacaatggatgacacaaaactatgagagtgacaaaatggtgacaggtagctgggacctaggctatcttaccatgaaggttgttttgcttattgtatatttgtgtatgtagtgtaactattttgtacaatagaggactgtaactactatttaggttgtacagattgaaatttagttgtttcattggctgtctgaggaggtgtggacttttatatatagatctacataaaaactgctacatgacaaaaaccacacctaaaccccttttaagaatttggcacagttactcactttgtgtaatctgaaatctagctgctgaatacgctgaagtaaatccttgttcactgaagtctttcaattgagctggttgaatactttgaaaaatgctcagttctaactaatgaaatggatttcccagtaggggtttctgcatatcacctgtatagtagttatatgcatatgtttctgtgcatgttctctacacaattgtaaggtgtcactgtatttaactgttgcacttgtcaactttcaataaagcatataaatgttg

SEQ ID NO: 445 - skipped

SEQ ID NO: 446 - DNA, 491 bp, Homo Sapiens
  misc_feature 342: n = A,T,C or G
tttttttttttttttttttcactatgaaaatgctttaatggtggtgtctgtacagcatggatgtggacagggaaaacagcaagtgcacacagtgggacaggccacaggacaggctgggagtgaataaagagttcacactgcttccctgctttccccagtgactgaaggctctaggccacctcctcctcagcctcctcctcgaactcgccctcctcctcggctgtggcatcctggtactgctggtactcggacaccaggtcattcatgttgctctcggcctcggtgaactccatctcgtccatgccctcgcccgtgtaccagtgcaggaaggccttgcgcggnaacatggccgtgaactgctcggagatgcgcttgaacagctcctggatggccgtgctgttgccaatgaaggtggcggacatttttaaccccgaggtgggatgtcacgacagccgttttcacattgttgggggatcactcaacaaaatagc

SEQ ID NO: 447 - protein, 94 aa, Homo Sapiens
MLTELEKALNSIIDVYHKYSLIKGNFHAVYRDDLKKLLETECPQYIRKKGADVWFKELDINTDGAVNFQEFLILVIKMGWQPTKKAMKKATKSS

SEQ ID NO: 448 - DNA, 424 bp, Homo Sapiens
  misc_feature 40: n = A,T,C or G
atgtctcttgtcagctgtctttcagaagacctggtggggnaagtccgtgggcatcatgttgaccgagctggagaaagccttgaactctatcatcgacgtctaccacaagtactccctgataaaggggaatttccatgccgtctacagggatgacctgaagaaattgctagagaccgagtgtcctcagtatatcaggaaaaagggtgcagacgtctggttcaaagagttggatatcaacactgatggtgcagttaacttccaggagttcctcattctggtgataaagatgggctggcagcccacaaaaaaagccatgaagaaagccacaaagagtagctgagttactgcccagaggctgggcccctgacatgtacctgcagaataataaagtcatcaatacctcaaaaaaaaaaaaaaaaaaaaa

SEQ ID NO: 449 - protein, 1148 aa, Homo Sapiens
MDIRKFFGVIPSGKKLVSETVKKNEKTKSDEETLKAKKGIKEIKVNSSRKEDDFKQKQPSKKKRIIYDSDSESEETLQVKNAKKPPEKLPVSSKPGKISRQDPVTYISETDEEDDFMCKKAASKSKENGRSTNSHLGTSNMKKNEENTKTKNKPLSPIKLTPTSVLDYFGTGSVQRSNKKMVASKRKELSQNTDESGLNDEAIAKQLQLDEDAELERQLHEDEEFARTLAMLDEEPKTKKARKDTEAGETFSSVQANLSKAEKHKYPHKVKTAQVSDERKSYSPRKQSKYESSKESQQHSKSSADKIGEVSSPKASSKLAIMKRKEESSYKEIEPVASKRKENAIKLKGETKTPKKTKSSPAKKESVSPEDSEKKRTNYQAYRSYLNREGPKALGSKEIPKGAENCLEGLIFVITGVLESIERDEAKSLIERYGGKVTGNVSKKTNYLVMGRDSGQSKSDKAAALGTKIIDEDGLLNLIRTMPGKKSKYEIAVETEMKKESKLERTPQKNVQGKRKISPSKKESESKKSRPTSKRDSLAKTIKKETDVFWKSLDFKEQVAEETSGDSKARNLADDSSENKVENLLWVDKYKPTSLKTIIGQQGDQSCANKLLRWLRNWQKSSSEDKKHAAKFGKFSGKDDGSSFKAALLSGPPGVGKTTTASLVCQELGYSYVELNASDTRSKSSLKAIVAESLNNTSIKGFYSNGAASSVSTKHALIMDEVDGMAGNEDRGGIQELIGLIKHTKIPIICMCNDRNHPKIRSLVHYCFDLRFQRPRVEQIKGAMMSIAFKEGLKIPPPAMNEIILGANQDIRQVLHNLSMWCARSKALTYDQAKADSHRAKKDIKMGPFDVARKVFAAGEETAHMSLVDKSDLFFHDYSIAPLFVQENYIHVKPVAAGGDMKKHLMLLSRAADSICDGDLVDSQIRSKQNWSLLPAQAIYASVLPGELMRGYMTQFPTFPSWLGKHSSTGKHDRIVQDLALHMSLRTYSSKRTVNMDYLSLLRDALVQPLTSQGVDGVQDVVALMDTYYLMKEDFENIMEISSWGGKPSPFSKLDPKVKAAFTRAYNKEAHLTPYSLQAIKASRHSTSPSLDSEYNEELNEDDSQSDEKDQDAIETDAMIKKKTKSSKPSKPEKDKEPRKGKGKSSKK

SEQ ID NO: 450 - DNA, 5185 bp, Homo Sapiens
gtccttgcttcttttttcattgatgtaaatttttttaacttaatatgaaaactctccaagtcttgatcatcagccaggattttgccacagcaatttcattctcttatcggagcttgtatgtgtcaaagtatacttcagagtgcaaacattaagcaagtaatatattttacctacagatacttatgaagacattctttcgctatcgtgagtaaaagtatataaagctgtttctaactgaaaatgcttgaaataagcctgtaatagaaatattttttcattttttaaaaaagggcggaattcccagactgtcttcgccttcttgcacttcgcgggagaagttgttggcgcgaatggatcctgagcctcgataacagattcctcaaccggcccacccgccagccagccagcgccttcatcctggggctgcgatggacattcggaaattctttggagtaataccaagtggaaagaaacttgtaagtgaaacagtaaagaagaatgagaaaacaaagtctgatgaagaaactttaaaagcaaagaaaggaataaaggaaatcaaggtaaatagctcccgtaaagaggatgacttcaaacaaaagcaaccaagcaagaaaaagaggatcatctatgattcagattcagagtcagaggagacgttgcaggtaaaaaatgccaaaaagccaccagaaaaactgccagtatcttctaaacctggtaaaatttcacggcaggatcctgttacatacatttcagaaacagatgaagaagatgactttatgtgtaagaaggcggcctctaaatcaaaagagaatggaagatctacaaatagtcatcttggaacatcaaacatgaaaaagaatgaagaaaacactaagaccaagaataagcctttatcaccaataaaacttacacccacatcagtacttgattattttggaactggaagtgtccaaagatctaataagaagatggtggcaagcaaaagaaaagagctttcacaaaatacagatgagtctggattaaatgatgaagccatcgccaagcaattacagcttgatgaagatgcggagctggagaggcagttgcatgaagatgaagagtttgccagaacattagccatgttggatgaagaacccaagaccaaaaaggctcgaaaggacacagaagcgggagaaacgttttcatctgtccaagccaatttaagtaaagcagaaaaacataaatatcctcataaagtaaaaacagcacaagtttcagatgaaagaaagagctacagtcctaggaagcaaagtaaatatgaaagttcaaaagaatctcagcaacattccaagtcatcagctgacaaaataggagaagtctcttctcccaaggccagttctaagctggcaattatgaaaagaaaagaagagagctcttataaagaaatagagcctgtggcctcaaaaagaaaagaaaatgccattaaattgaaaggagagacaaaaactcctaagaaaaccaaaagttctccagctaaaaaagagtctgtaagtcctgaagattctgaaaagaaacgcactaattatcaagcttatcgaagctacttaaatcgagaaggtcccaaggctctgggctccaaagaaataccaaagggagctgaaaattgcttggaaggccttatatttgtaatcacaggcgtgctggagtctattgaacgagatgaggccaagtctctaattgaacgttatgggggaaaagtaacaggaaatgtcagcaagaaaacaaattatcttgtcatgggtcgtgatagtggacagtccaagagtgataaggccgcagccttggggacaaaaattattgatgaagatggcctgttgaatctgattcggactatgccaggcaagaaatccaagtatgaaatagcagttgaaactgagatgaagaaagagtccaaactggagagaacaccccaaaaaaatgtccaaggaaaaagaaaaattagtccatctaaaaaggaatcagaatctaaaaagagcaggccgacttccaaaagggacagtttggcaaagacaataaaaaaggaaacagatgtgttttggaaaagcctggatttcaaggagcaggtggctgaggagacaagtggtgacagcaaggctaggaatttggctgatgacagcagtgaaaacaaagtggaaaatttgctctgggtggataaatataagccaacctcgctcaagaccataattggacagcaaggtgaccagagctgtgccaacaaactcctacgctggctccgaaactggcaaaagagttcttccgaagataaaaaacacgcagcaaagtttggtaaattttccggcaaagatgatggctctagttttaaagcagcgttgctgtcaggccctcctggtgttggcaaaaccaccacagcttccctggtgtgtcaggagttgggatacagctacgtggaactgaatgcaagtgacacccggagtaagagcagtttgaaggcgattgttgctgagtcactgaacaataccagcatcaaaggcttttattcaaatggagcagcctcttcagtaagcacgaaacatgctctcatcatggatgaagtagatggcatggcaggcaatgaggataggggaggaattcaggaattaattggcctgataaaacatactaaaattcccattatttgtatgtgcaatgatagaaatcatcccaagattcgctctctggttcattattgttttgatcttcgttttcaaagacctcgggttgaacagattaagggtgctatgatgtctattgcatttaaagaaggtttaaagattccccctccagctatgaatgaaataattttgggagccaatcaagatatcagacaggttttacataatctgagtatgtggtgtgcacgaagtaaagcattaacctatgaccaggccaaagctgattctcacagagccaaaaaggatatcaaaatgggcccatttgatgttgcccggaaagtgtttgcagctggagaggagactgctcacatgtcacttgtggacaagtcagatctcttttttcatgattattcaatagcacccctcttcgtccaggaaaattacatacacgtgaagcctgtagcagcagggggtgacatgaaaaagcacctgatgcttttaagcagagcagcagacagcatatgcgatggtgacctagtggacagccagatccggagtaagcaaaactggagtcttctgcctgcgcaggccatttatgccagtgttcttcctggagagttgatgagggggtacatgacccagtttcccaccttcccaagctggctggggaagcactcgtctacaggcaaacatgatcgtattgttcaggacctggccttgcatatgagtctcagaacttactccagcaaaaggactgtaaacatggattatctgtcgcttctaagggatgcacttgtacagcccttgacctcacaaggagtagacggagtacaggatgttgttgcacttatggacacatattatttgatgaaagaagactttgagaatatcatggaaatcagcagctggggtggcaaacctagtcccttttcaaagctggatcccaaggtgaaagcagccttcacaagagcttacaataaggaagcccaccttactccatactcacttcaagctataaaggcatctagacacagcacaagcccatccctggattcggaatacaatgaagaattaaatgaagatgactctcaatctgatgagaaagaccaagatgctatagaaactgatgccatgatcaagaaaaagacaaaatcttcaaagccttcaaaaccagaaaaagataaggagcccagaaaaggaaaaggaaaaagttcgaagaaatgaaaccatttttcactagcgacagccactttttactctccctcctgaccagtccagctggtctagagaaagccttgttttttcccagagcaaccatgttttagcataatgggatgacctggtgtcccattataaataaagggtggtatggctagaagggtatgagcagtaggcttatgtacacctcttatagaggttgataggactgcttgggtcctccactgtcctctgtcaatctagttagacgtgcttctgaatgactgtagaattggaactagaaactacacctgggctttggagtcagattttagttaacaataatgagcctggagcagtagtactaaggcgtcttttgtaggcttaagaatttatcctaatggcctttataggaccaatgctgattttttttaaaggcagttcctattatgtggtgaaattttgtaaataaatgattatacaaaacagtcaccacctagaactgggtattctttgtacattgtcagatatctttcaaagtataaattaggaataaaaatgttccacatgatatgtgtacaaattctttttaagattgtcatcttgtacagcaaaatattatgttggtatattacttccttattaatttgcaaatgattggattaaaaaagctcactgtattccttactaacctgttgtgtgaaacataacattggcagtcgaggagtcagaactcggattcccagcctcactccctctgtgtgtgttgaccacgtctctgctgtgaataggatttcatgcagtggtctgttatggggctttgcagcgtggggggctgcagaagattctcagacattcttatccttctggagtctcaacccatcaggttcagaccagtaggaaccaggctgggtcaggctcttaatttcactacggtgggggacaaaatgaacactggcttttgttcactttgcccctgagagatctagtcctgtcctgtgatggcttccacaaaccctgttggaagtttgggttattcctataactgtatgtgttgagtggccgtgacgtatggacctagcctggaatttagatgtctagctattttttaatcttgttggtaaatgctcagaggtctgtgctacctctgtgaggtatatactaaaatgaatgtaaaataaggatcgtattccctgctttaaggaactggtagtcttgtttgggtgatgagacaaagttcttgagacatttaaactgtatttaccagtgtgaaaaatgtcatttatggagattaattcattatggaaataaaacattgcctaagcccttgcctgctg

SEQ ID NO: 451 - protein, 144 aa, Homo Sapiens
MACAAARSPADQDRFICIYPAYLNNKKTIAEGRRIPISKAVENPTATEIQDVCSAVGLNVFLEKNKMYSREWNRDVQYRGRVRVQLKQEDGSLCLVQFPSRKSVMLYAAEMIPKLKTRTQKTGGADQSLQQGEGSKKGKGKKKK

SEQ ID NO: 452 - DNA, 894 bp, Homo Sapiens
cggaaactcagagccgggttcctcccgggtttctgccgggtttctccctgcggctcctgggttgttgagactcttgtgaagatggcttgcgctgccgcgcggtccccggccgaccaggacaggtttatttgtatctatcctgcttatttaaataataagaagaccatcgcagagggaaggcgaatccccataagtaaggctgttgaaaatcctacagctacagagattcaagatgtatgttcagcagttggacttaacgtatttcttgagaaaaataaaatgtactctagagaatggaatcgtgatgtccaatacagaggcagagtccgggtccagctcaaacaggaagatgggagcctctgccttgtacagttcccatcacgtaagtcagtaatgttgtatgcagcagaaatgatacctaaactaaaaacaaggacacaaaaaacaggaggtgctgaccaaagtcttcaacaaggagagggaagtaaaaaagggaaaggaaagaaaaagaagtaacctagtatcagcatcaagtatgtggtactactgtaagagacatgaatggagacttctaatttgtatcggagggaaacagaagctttttgtttgcatcatttaactgaactgtgaacccttgtgcctctcatctttatcatcggagttgacagtgaaacaaatttacatcagaagtttgcatctcgcgtatatgccgtataaaagaatttttttgtctttcaatgcagttttttggaagaaaatatttttaaatggacaatggactgtacaataagttacttgaaataagttgtttcagataaatttcaattagatttaaaataaacattatgtccaccttttaagttaatgaaataaaatttgaaactgaaaaaaaaa

SEQ ID NO: 453 - skipped

SEQ ID NO: 454 - DNA, 578 bp, Homo Sapiens
caaattccctctggcacagtggggatgtgtggaaaaaaactgaagtcaaagacctcctgcgtcgtctaactggtcaggctgaaggcaagctaatctctgtagaatatggaacagaggaaaaaataaaaataccagtaatatctgtttattcaggtccactcagaagtggtaggaacatagaaagagtgtctttctacctaggattttccattgaaggccctctggcatatgatatagaagtaatttaagacaatacatcacctgtagttcaaatatgtttatttatatctttatgattttattctctctctccattctcatggcactttcataacattatggctaacctctaattacagattttgcttttgcctccctgaatgaattacaagcctttttaagatatgaaatatgcctacccgcagagcttggcacaaagtggagtcaatcttttaatgttttaaatatgcattttcagactcaaataattaagaagtttcattgatatccactggtcacatcataactgtctatagggcaataaaatctgtgttaaactcaaaaaaaacaaaaaaaaa

SEQ ID NO: 455 - protein, 261 aa, Homo Sapiens
MSRRYDSRTTIFSPEGRLYQVEYAMEAIGHAGTCLGILANDGVLLAAERRNIHKLLDEVFFSEKIYKLNEDMACSVAGITSDANVLTNELRLIAQRYLLQYQEPIPCEQLVTALCDIKQAYTQFGGKRPFGVSLLYIGWDKHYGFQLYQSDPSGNYGGWKATCIGNNSAAAVSMLKQDYKEGEMTLKSALALAIKVLNKTMDVSKLSAEKVEIATLTRENGKTVIRVLKQKEVEQLIKKHEEEEAKAEREKKEKEQKEKDK

SEQ ID NO: 456 - DNA, 1078 bp, Homo Sapiens
ccgtggacatctcaggtcttcagggtcttccatctggaactatataaagttcagaaaacatgtctcgaagatatgactccaggaccactatattttctccagaaggtcgcttataccaagttgaatatgccatggaagctattggacatgcaggcacctgtttgggaattttagcaaatgatggtgttttgcttgcagcagagagacgcaacatccacaagcttcttgatgaagtctttttttctgaaaaaatttataaactcaatgaggacatggcttgcagtgtggcaggcataacttctgatgctaatgttctgactaatgaactaaggctcattgctcaaaggtatttattacagtatcaggagccaataccttgtgagcagttggttacagcactgtgtgatatcaaacaagcttatacacaatttggaggaaaacgtccctttggtgtttcattgctgtacattggctgggataagcactatggctttcagctctatcagagtgaccctagtggaaattacgggggatggaaggccacatgcattggaaataatagcgctgcagctgtgtcaatgttgaaacaagactataaagaaggagaaatgaccttgaagtcagcacttgctttagctatcaaagtactaaataagaccatggatgttagtaaactctctgctgaaaaagtggaaattgcaacactaacaagagagaatggaaagacagtaatcagagttctcaaacaaaaagaagtggagcagttgatcaaaaaacatgaggaagaagaagccaaagctgagcgtgagaagaaagaaaaagaacagaaagaaaaggataaatagaatcagagattttattactcatttggggcaccatttcagtgtaaaagcagtcctactcttccacactaggaaggctttactttttttaactggtgcagtgggaaaataggacattacatactgaattgggtccttgtcatttctgtccaattgaatactttattgtaacgatgatggttacccttcatggacgtcttaatcttccacacacatcccctttttttggaataaaa

SEQ ID NO: 457 - protein, 323 aa, Homo Sapiens
MAAELSMGPELPTSPLAMEYVNDFDLLKFDVKKEPLGRAERPGRPCTRLQPVGSVSSTPLSTPCSSVPSSPSFSPTEQKTHLEDLYWMASNYQQMNPEALNLTPEDAVEALIGSHPVPQPLQSFDSFRGAHHHHHHHHPHPHHAYPGAGVAHDELGPHAHPHHHHHHQASPPPSSAASPAQQLPTSHPGPGPHATASATAAGGNGSVEDRFSDDQLVSMSVRELNRHLRGFTKDEVIRLKHKRRTLKNRGYAQSCRYKRVQQKHHLENEKTQLIQQVEQLKQEVSRLARERDAYKVKCEKLANSGFREAGSTSDSPSSPEFFL

SEQ ID NO: 458 - DNA, 3071 bp, Homo Sapiens
cgcttggctcggcgcgctccggccggccgcaaagtttcccgggcggcagcggcggctgcgcctcgcttcagcgatggccgcggagctgagcatggggccagagctgcccaccagcccgctggccatggagtatgtcaacgacttcgacctgctcaagttcgacgtgaagaaggagccactggggcgcgcggagcgtccgggcaggccctgcacacgcctgcagccagtcggctcggtgtcctccacaccgctcagcactccgtgtagctccgtgccctcgtcgcccagcttcagcccgaccgaacagaagacacacctcgaggatctgtactggatggcgagcaactaccagcagatgaaccccgaggcgctcaacctgacgcccgaggacgcggtggaagcgctcatcggctcgcacccagtgccacagccgctgcaaagcttcgacagctttcgcggcgctcaccaccaccaccatcaccaccaccctcacccgcaccacgcgtacccgggcgccggcgtggcccacgacgagctgggcccgcacgctcacccgcaccatcaccatcatcaccaagcgtcgccgccgccgtccagcgccgctagcccggcgcaacagctgcccactagccaccccgggcccgggccgcacgcgacggcctcggcgacggcggcgggcggcaacggcagcgtggaggaccgcttctccgacgaccagctcgtgtccatgtccgtgcgcgagctgaaccgccacctgcggggcttcaccaaggacgaggtgatccgcctgaagcacaagcggcggaccctgaagaaccggggctacgcccagtcttgcaggtataaacgcgtccagcagaagcaccacctggagaatgagaagacgcagctcattcagcaggtggagcagcttaagcaggaggtgtcccggctggcccgcgagagagacgcctacaaggtcaagtgcgagaaactcgccaactccggcttcagggaggcgggctccaccagcgacagcccctcctctcccgagttctttctgtgagtcgtggccggtcctggcccccgcccttgccccggcccggactccctgtcccacgtccctagtcccagactaccccggaccctgtccctgccgcggccccagccttgacctgtttgacttgagcgagagggaggaagggcgcgcgggccgcgggcgacgggcgggtgcgcgggcgggcaggggaccttggctaaggcgagagtagcgcacgccagcgccgcctcctagactcgagcagagccggagagagagacgagagggtgggaggtcccggagtaacttctctccaggctgaagggcggcgaggcatactcccgataagtcaccaaggccatctggagactcctggctttctgaactttgcgcgttaagccgggacagctgctttgctgcccggagagtagtccgcgccaggaagagagcaacgaggaaaggagagggactctggcgtcccggcaggcgagaggcgaggctgagcgaaagaaggaaggaccagacggaccctgtctgtcagagttcggagaaacactggctcctcagccctgagacacaggccctcagttagggacgctcggggcacgaggctcatcagttttattgcctgctcgattatatagaaaaatacaaaaaatctgcattaaaaatattaatcctgcatgctggacatgtatggtaataatttctattttgtaccattttcttgtttaactttagcatgttgttgatcatggatcatactccccttgtttctttgggtgagaagggatcgcagtttggaaactccggcggctgcgtgcggggtttcagtcccagctgtaggcttgtaaatacccgccccgccaaaccgcatagagaacgtggcagcaagctgagggtctttgtttgggtttattattacggtatttttgtttgtaagttaaaaagaaaaaaaaaaagaaaaagttccgggcattttgcatcagaaaacaactttgtcttggggcacacttggaagttgcatgttttctttccttcccttatccccattcggtcctctttttcctctctcgctttagttttcaaccttgttggtgctgagagagagaaccgagaggtcccagtacaagggcagggcagggcagggaagctgccaagctccgcaccccagaggagtgttctggactacagccttgtcttatggtcaaattgatacccttaataagaaaggaaaggaaaggaaaacagatcctcccctctgctttttattgtaaccagaatcaccctgaggtcccttctgaaccctctgggcctgcgctaattgtaggagccacagcgctcctagggtgagaggcttagccatccctgaccctggcagtgcactggtaagcagacactgcactgaaccaactgctatgctcagaatgtaccagaaacccaaacattggcaagtaattttgcaactttcaagtgcgttctttagaccaatgcattgcgtttctttccctgcttttgagatagtaggaagagttcttggtggtgtccccccccttcaattcttcagttgtatagtagttatagggaagatatgggtgtttttctttattattacttttttttttctgcaggtcagtaaaaggatttaagttgcactgacaaaaataccaaaataaaagtgtatttttaagttcccatttgaaattgctggcgctgctggccggatgcatttttgagtttgtattagttgataaattaacagtaataacaagattgtatgaaccgcatggtgcttgcagttttaaatattgtggatatttgtcctgcatcagaaacgagctttggtttttacagattcaactgtgttgaaatcaaacctgccgcaacagaaattgtttttatttcatgtaaaataagggatcaatttcaaaccctgcttatgatatgaaaatattaaaacctagtctattgtagttttattcagactggtttctgttttttggttattaaaatggtttcctattttgcttattaaaaaaaaaaaaaaaaaaaa

SEQ ID NO: 459 - protein, 492 aa, Homo Sapiens
MAPVGVEKKLLLGPNGPAVAAAGDLTSEEEEGQSLWSSILSEVSTRARSKLPSGKNILVFGEDGSGKTTLMTKLQGAEHGKKGRGLEYLYLSVHDEDRDDHTRCNVWILDGDLYHKGLLKFAVSAESLPETLVIFVADMSRPWTVMESLQKWASVLREHIDKMKIPPEKMRELERKFVKDFQDYMEPEEGCQGSPQRRGPLTSGSDEENVALPLGDNVLTHNLGIPVLVVCTKCDAVSVLEKEHDYRDEHLDFIQSHLRRFCLQYGAALIYTSVKEEKNLDLLYKYIVHKTYGFHFTTPALVVEKDAVFIPAGWDNEKKIAILHENFTTVKPEDAYEDFIVKPPVRKLVHDKELAAEDEQVFLMKQQSLLAKQPATPTRASESPARGPSGSPRTQGRGGPASVPSSSPGTSVKKPDPNIKNNAASEGVLASFFNSLLSKKTGSPGSPGAGGVQSTAKKSGQKTVLSNVQEELDRMTRKPDSMVTNSSTENEA

SEQ ID NO: 460 - DNA, 1622 bp, Homo Sapiens
ggcaagatggcgccggtgggggtggagaagaagctgctgctaggtcccaacgggcccgcggtggcggccgccggcgacctgaccagtgaggaggaggaaggccagagcctatggtcctccattctgagcgaagtgtccacccgcgccaggtccaagctgccgtccggcaagaacatcctggtcttcggtgaagatggttctggtaaaacaaccctcatgactaaactacaaggagctgagcatggcaaaaaaggaagaggcctagaatatctctacctcagtgtccatgatgaggaccgagatgatcacacgcgctgcaacgtgtggattctggatggagacttgtaccacaaaggcctgctgaaatttgcagtttctgctgaatccttgccagagaccctcgtcatttttgttgcagacatgtctagaccttggactgtgatggaatctctgcagaaatgggctagtgttttacgtgagcacattgataaaatgaaaattccaccagaaaaaatgagggagctggaacggaagtttgtgaaagattttcaagactatatggaacctgaagaaggttgtcaaggttccccacagagaagaggccctctgacctcaggctccgatgaagaaaatgttgccctgcctctgggtgacaatgtgctgactcataacctggggatcccggtgttggtggtgtgcacaaagtgtgatgcggtgagtgtcctggagaaggagcacgattacagggatgagcatttggactttatccagtcacacctgcggaggttctgccttcagtatggagctgccttgatttacacatcagtgaaagaagagaaaaacctcgacttgttgtataagtatattgttcataaaacatacggtttccacttcaccacacctgccttagttgtggaaaaggatgccgtttttatacctgcaggctgggacaatgaaaagaaaatagctattttacatgaaaattttacaaccgtgaagccggaagatgcatatgaagactttattgtgaaacctcccgtgagaaagctggtccacgacaaagagttggcagcagaagatgagcaggtgttcctaatgaagcaacagtcactccttgccaagcaaccagccactcccacgagagcttctgaatctcctgcaagaggaccctctggctctccaaggacccagggtcggggagggccagccagtgtgcctagctcctccccaggcacgtcagtaaaaaagccggacccaaacatcaaaaataatgcagcaagtgaaggggtgttggccagcttcttcaacagtctgttgagtaaaaagacaggctctcctggaagtcctggtgctggtggggtgcagagcacagccaagaagtcaggacaaaagactgtgttgtcaaatgttcaggaagaactggatagaatgactcgaaagccagactctatggtaacaaactcttcaacagaaaatgaagcctgaacctccttaaaaagtgcatatgtcgaatgaccaaataactatgtatattgatctgctaagaccaggatttttctgatatggcacatgctatcagttttttggggcaggggagatgaactttaaaaaaaaaaaaaaaa

SEQ ID NO: 461 - protein, 183 aa, Homo Sapiens [sequence omitted]

SEQ ID NO: 462 - DNA, 1790 bp, Homo Sapiens
ggagacgctgcagacccgcgacccggagcagctcggaggcggtgaataatagctcttcaagtctgcaataaaaaatggcctccaacaaaactacattgcaaaaaatgggaaaaaaacagaatggaaagagtaaaaaagttgaagaggcagagcctgaagaatttgtcgtggaaaaagtactagatcgacgtgtagtgaatgggaaagtagaatatttcctgaagtggaagggatttacagatgctgacaatacttgggaacctgaagaaaatttagattgtccagaattgattgaagcgtttcttaactctcagaaagctggcaaagaaaaagatggtacaaaaagaaaatctttatctgacagtgaatctgatgacagcaaatcaaagaagaaaagagatgctgttgacaaaccaagaggatttgccagaggtcttgatcctgaaagaataattggtgccacagacagcagtggagaattgatgtttctcatgaaatggaaagattcagatgaggcagacttggtgctggcgaaagaggcaaatatgaagtgtcctcaaattgtaattgctttttatgaagagagactaacttggcattcttgtccagaagatgaagctcaataattgttcacattgttcttttatatatatttatatatatatataaaaattgggtcttagattttgatttactagtgtgacaaaataactacatcctaatgaaaatcaagtttgatatgtttgttttgaaagtagcgttggaagagttgttggggtttttttgcatccatagcactggttactttgaacaaataaataaaagctttctgtagttgcttcctttatcagaaaagaacatttgataccatggtatatcatttcctcttcattaaagaacagcttttctaaatgttgggggaaatgtccatagtcattactcagtcaaaacttgtgttctcatgagcctaaggaccattctagatttattacgtgttttttgtgtgtgtgtgtgtgtgtgtgtgtgtgtatccataaaatgcatatgtaaatttttttttgtttttaagcattcacccaaacaaaaaaatcacaggtaaacccatgtttctgagatgccattattccaagcaaaataagagataatcccttcaagttaaattgaaaattttcctgaaaccatacatttcaagtgaaataagtaattctagataggacaatttaaattggataattttaaagtgtctataattgcagtggtttatttgcaaaattcctaaaaggaaaaattttatcactgccatcacagcaggtttcctcatccagatgaggaaactagacaaatgctagtgtgttttaactagctaaacaaaactaagttaaatgaacatttaaaagtttccctagcgggccattccttagcaaaatgttggaatccctgttgctacattgactaaaaggtcatgatgaatggaatatgtaagacttggctcatagaaacctaatcagatggttagaggtgttggcagtttaggacctgctgtcataaatgtgtgaacaaccttttgtaacctaacctattgacctgcatgttttttctttaccccaattcattacatggaggctcaatcttgagtttgctttactggttcagcaaaagccaggaagaacaactttgtagtaatcaaaatgttatccaactgtatattgtttactttattgtaaatactggtgaacagtggttaataaatagttttatattccaaaaaaaaaaaaaaaaaaaaaaaaaaa

SEQ ID NO: 463 - protein, 99 aa, Homo Sapiens
MKASAALLCLLLTAAAFSPQGLAQPVGINTSTTCCYRFINKKIPKQRLESYRRTTSSHCPREAVIFKTKLDKEICADPTQKWVQDFMKHLDKKTQTPKL

SEQ ID NO: 464 - DNA, 810 bp, Homo Sapiens
agcagaggggctgagaccaaaccagaaacctccaattctcatgtggaagcccatgccctcaccctccaacatgaaagcctctgcagcacttctgtgtctgctgctcacagcagctgctttcagcccccaggggcttgctcagccagttgggattaatacttcaactacctgctgctacagatttatcaataagaaaatccctaagcagaggctggagagctacagaaggaccaccagtagccactgtccccgggaagctgtaatcttcaagaccaaactggacaaggagatctgtgctgaccccacacagaagtgggtccaggactttatgaagcacctggacaagaaaacccaaactccaaagctttgaacattcatgactgaactaaaaacaagccatgacttgagaaacaaataatttgtataccctgtcctttctcagagtggttctgagattattttaatctaattctaaggaatatgagctttatgtaataatgtgaatcatggtttttcttagtagattttaaaagttattaatattttaatttaatcttccatggattttggtgggttttgaacataaagccttggatgtatatgtcatctcagtgctgtaaaaactgtgggatgctcctcccttctctacctcatgggggtattgtataagtccttgcaagaatcagtgcaaagatttgctttaattgttaagatatgatgtccctatggaagcatattgttattatataattacatatttgcatatgtatgactcccaaattttcacataaaatagatttttgtaaaaaa

SEQ ID NO: 465 - protein, 698 aa, Homo Sapiens
MQAHELFRYFRMPELVDFRQYVRTLPTNTLMGFGAFAALTTFWYATRPKPLKPPCDLSMQSVEVAGSGGARRSALLDSDEPLVYFYDDVTTLYEGFQRGIQVSNNGPCLGSRKPDQPYEWLSYKQVAELSECIGSALIQKGFKTAPDQFIGIFAQNRPEWVIIEQGCFAYSMVIVPLYDTLGNEAITYIVNKAELSLVFVDKPEKAKLLLEGVENKLIPGLKIIVVMDAYGSELVERGQRCGVEVTSMKAMEDLGRANRRKPKPPAPEDLAVICFTSGTTGNPKGAMVTHRNIVSDCSAFVKATENTVNPCPDDTLISFLPLAHMFERVVECVMLCHGAKIGFFQGDIRLLMDDLKVLQPTVFPVVPRLLNRMFDRIFGQANTTLKRWLLDFASKRKEAELRSGIIRNNSLWDRLIFHKVQSSLGGRVRLMVTGAAPVSATVLTFLRAALGCQFYEGYGQTECTAGCCLTMPGDWTAGHVGAPMPCNLIKLVDVEEMNYMAAEGEGEVCVKGPNVFQGYLKDPAKTAEALDKDGWLHTGDIGKWLPNGTLKIIDRKKHIFKLAQGEYIAPEKIENIYMRSEPVAQVFVHGESLQAFLIAIVVPDVETLCSWAQKRGFEGSFEELCRNKDVKKAILEDMVRLGKDSGLKPFEQVKGITLHPELFSIDNGLLTPTMKAKRPELRNYFRSQIDDLYSTIKV

SEQ ID NO: 466 - DNA, 3635 bp, Homo Sapiens
tcaacacaggacaatgcaagcccatgagctgttccggtattttcgaatgccagagctggttgacttccgacagtacgtgcgtactcttccgaccaacacgcttatgggcttcggagcttttgcagcactcaccaccttctggtacgccacgagacccaaacccctgaagccgccatgcgacctctccatgcagtcagtggaagtggcgggtagtggtggtgcacgaagatccgcactacttgacagcgacgagcccttggtgtatttctatgatgatgtcacaacattatacgaaggtttccagaggggaatacaggtgtcaaataatggcccttgtttaggctctcggaaaccagaccaaccctatgaatggctttcatataaacaggttgcagaattgtcggagtgcataggctcagcactgatccagaagggcttcaagactgccccagatcagttcattggcatctttgctcaaaatagacctgagtgggtgattattgaacaaggatgctttgcttattcgatggtgatcgttccactttatgatacccttggaaatgaagccatcacgtacatagtcaacaaagctgaactctctctggtttttgttgacaagccagagaaggccaaactcttattagagggtgtagaaaataagttaataccaggccttaaaatcatagttgtcatggatgcctacggcagtgaactggtggaacgaggccagaggtgtggggtggaagtcaccagcatgaaggcgatggaggacctgggaagagccaacagacggaagcccaagcctccagcacctgaagatcttgcagtaatttgtttcacaagtggaactacaggcaaccccaaaggagcaatggtcactcaccgaaacatagtgagcgattgttcagcttttgtgaaagcaacagagaatacagtcaatccttgcccagatgatactttgatatctttcttgcctctcgcccatatgtttgagagagttgtagagtgtgtaatgctgtgtcatggagctaaaatcggatttttccaaggagatatcaggctgctcatggatgacctcaaggtgcttcaacccactgtcttccccgtggttccaagactgctgaaccggatgtttgaccgaattttcggacaagcaaacaccacgctgaagcgatggctcttggactttgcctccaagaggaaagaagcagagcttcgcagcggcatcatcagaaacaacagcctgtgggaccggctgatcttccacaaagtacagtcgagcctgggcggaagagtccggctgatggtgacaggagccgccccggtgtctgccactgtgctgacgttcctcagagcagccctgggctgtcagttttatgaaggatacggacagacagagtgcactgccgggtgctgcctaaccatgcctggagactggaccgcaggccatgttggggccccgatgccgtgcaatttgataaaacttgttgatgtggaagaaatgaattacatggctgccgagggcgagggcgaggtgtgtgtgaaagggccaaatgtatttcagggctacttgaaggacccagcgaaaacagcagaagctttggacaaagacggctggttacacacaggggacattggaaaatggttaccaaatggcaccttgaaaattatcgaccggaaaaagcacatatttaagctggcacaaggagaatacatagcccctgaaaagattgaaaatatctacatgcgaagtgagcctgttgctcaggtgtttgtccacggagaaagcctgcaggcatttctcattgcaattgtggtaccagatgttgagacattatgttcctgggcccaaaagagaggatttgaagggtcgtttgaggaactgtgcagaaataaggatgtcaaaaaagctatcctcgaagatatggtgagacttgggaaggattctggtctgaaaccatttgaacaggtcaaaggcatcacattgcaccctgaattattttctatcgacaatggccttctgactccaacaatgaaggcgaaaaggccagagctgcggaactatttcaggtcgcagatagatgacctctattccactatcaaggtttagtgtgaagaagaaagctcagaggaaatggcacagttccacaatctcttctcctgctgatggccttcatgttgttaattttgaatacagcaagtgtagggaaggaagcgttcgtgtttgacttgtccattcggggttcttctcataggaatgctagaggaaacagaacaccgccttacagtcacctcatgttgcagaccatgtttatggtaatacacactttccaaaatgagccttaaaaattgtaaaggggatactataaatgtgctaagttatttgagacttcctcagtttaaaaagtgggttttaaatcttctgtctccctgcttttctaatcaaggggttaggactttgctatctctgagatgtctgctacttgctgcaaattctgcagctgtctgctgctctaaagagtacagtgcactagagggaagtgttccctttaaaaataagaacaactgtcctggctggagaatctcacaagcggaccagagatctttttaaatccctgctactgtcccttctcacaggcattcacagaacccttctgattcgtaagggttacgaaactcatgttcttctccagtcccctgtggtttctgttggagcataaggtttccagtaagcgggagggcagatccaactcagaaccatgcagataaggagcctctggcaaatgggtgctcatcagaacgcgtggattctctttcatggcagaatgctcttggactcggttctccaggcctgattccccgactccatcctttttcaggggttatttaaaaatctgccttagattctatagtgaagacaagcatttcaagaaagagttacctggatcagccatgctcagctgtgacgcctgaataactgtctactttatcttcactgaaccactcactctgtgtaaaggccaacagatttttaatgtggttttcatatcaaaagatcatgttgggattaacttgcctttttccccaaaaaataaactctcaggcaagcatttctttaaagctattaagggagtatatacttgagtacttattgaaatggacagtaataagcaaatgttcttataatgctacctgatttctatgaaatgtgtttgacaagccaaaattctaggatgtagaaatctggaaagttcatttcctgggattcacttctccagggattttttaaagttaatttgggaaattaacagcagttcactttattgtgagtctttgccacatttgactgaattgagctgtcatttgtacatttaaagcagctgttttggggtctgtgagagtacatgtattatatacaagcacaacagggcttgcactaaagaattgtcattgtaataacactacttggtagcctaacttcatatatgtattcttaattgcacaaaaagtcaataatttgtcaccttggggttttgaatgtttgctttaagtgttggctatttctatgttttataaaccaaaacaaaatttccaaaaacaatgaaggaaaccaaaataaatatttctgcatttcg

SEQ ID NO: 467 - protein, 125 aa, Homo Sapiens
MADEELEALRRQRLAELQAKHGDPGDAAQQEAKHREAEMRNSILAQVLDQSARARLSNLALVKPEKTKAVENYLIQMARYGQLSEKVSEQGLIEILKKVSQQTEKTTTVKFNRRKVMDSDEDDDY

SEQ ID NO: 468 - DNA, 559 bp, Homo Sapiens
ctgctccagcgctgacgccgagccatggcggacgaggagcttgaggcgctgaggagacagaggctggccgagctgcaggccaaacacggggatcctggtgatgcggcccaacaggaagcaaagcacagggaagcagaaatgagaaacagtatcttagcccaagttctggatcagtcggcccgggccaggttaagtaacttagcacttgtaaagcctgaaaaaactaaagcagtagagaattaccttatacagatggcaagatatggacaactaagtgagaaggtatcagaacaaggtttaatagaaatccttaaaaaagtaagccaacaaacagaaaagacaacaacagtgaaattcaacagaagaaaagtaatggactctgatgaagatgacgattattgaactacaagtgctcacagactagaacttaacggaacaagtctaggacagaagttaagatctgattatttactttgtttattgtctatatgccttttaaaaaaataaacttgttatgcaaaaaaaaaaaaaaaaaaaaaaaaaaaaaaaaaaaaaaaaa

SEQ ID NO: 469 - protein, 93 aa, Homo Sapiens
MQVSTAALAVLLCTMALCNQVLSAPLAADTPTACCFSYTSRQIPQNFIADYFETSSQCSKPSVIFLTKRGRQVCADPSEEWVQKYVSDLELSA

SEQ ID NO: 470 - DNA, 960 bp, Homo Sapiens
cgcaaagagtagtcagtcccttcttggctctgctgacactcgagcccacattccatcacctgctcccaatcatgcaggtctccactgctgcccttgccgtcctcctctgcaccatggctctctgcaaccaggtcctctctgcaccacgtgagtccatgttgttgttgtgggtatcaccactctctggccatggttagaccacatcagtctttttttgcggcctgagagccccgaagagaaaagaaggaagttcttaaagcgctgccaaacaccttggtctttttcttcacaacttttatttttatctctagaaggggtcttagccctcctagtctccagttgctgctgacacgccgaccgcctgctgcttcagctacacctcccgacagattccacagaatttcatagctgactactttgagacgagcagccagtgctccaagcccagtgtcatcttcctaaccaagagaggccggcaggtctgtgctgaccccagtgaggagtgggtccagaaatacgtcagtgacctggagctgagtgcctgaggggtccagaagcttcgaggcccagcgacctcagtgggcccagtggggaggagcaggagcctgagccttgggaacatgcgtgtgacctctacagctacctcttctatggactggttattgccaaacagccacactgtgggactcttcttaacttaaattttaatttatttatactatttagtttttataatttatttttgatttcacagtgtgtttgtgattgtttgctctgagagttccccctgtcccctccaccttccctcacagtgtgtctggtgacaaccgagtggctgtcatcggcctgtgtaggcagtgatggcaccaaagccaccagactgacaaatgtgtgatcagatgcttttgttcagggctgtgatcggcctggggaaataataaagatgttcttttaaacggt

SEQ ID NO: 471 - protein, 794 aa, Homo Sapiens
MELRPWLLWVVAATGTLVLLAADAQGQKVFTNTWAVRIPGGPAVANSVARKHGFLNLGQIFGDYYHFWHRGVTKRSLSPHRPRHSRLQREPQVQWLEQQVAKRRTKRDVYQEPTDPKFPQQWYLSGVTQRDLNVKAAWAQGYTGHGIVVSILDDGIEKNHPDLAGNYDPGASFDVNDQDPDPQPRYTQMNDNRHGTRCAGEVAAVANNGVCGVGVAYNARIGGVRMLDGEVTDAVEARSLGLNPNHIHIYSASWGPEDDGKTVDGPARLAEEAFFRGVSQGRGGLGSIFVWASGNGGREHDSCNCDGYTNSIYTLSISSATQFGNVPWYSEACSSTLATTYSSGNQNEKQIVTTDLRQKCTESHTGTSASAPLAAGIIALTLEANKNLTWRDMQHLVVQTSKPAHLNANDWATNGVGRKVSHSYGYGLLDAGAMVALAQNWTTVAPQRKCIIDILTEPKDIGKRLEVRKTVTACLGEPNHITRLEHAQARLTLSYNRRGDLAIHLVSPMGTRSTLLAARPHDYSADGFNDWAFMTTHSWDEDPSGEWVLEIENTSEANNYGTLTKFTLVLYGTAPEGLPVPPESSGCKTLTSSQACVVCEEGFSLHQKSCVQHCPPGFAPQVLDTHYSTENDVETIRASVCAPCHASCATCQGPALTDCLSCPSHASLDPVEQTCSRQSQSSRESPPQQQPPRLPPEVEAGQRLRAGLLPSHLPEVVAGLSCAFIVLVFVTVFLVLQLRSGFSFRGVKVYTMDRGLISYKGLPPEAWQEECPSDSEEDEGRGERTAFIKDQSAL

SEQ ID NO: 472 - DNA, 4180 bp, Homo Sapiens
gcggggaagcagcagcggccaggatgaatcccaggtgctctggagctggatggtgaaggtcggcactcttcaccctcccgagccctgcccgtctcggccccatgcccccaccagtcagccccgggccacaggcagtgagcaggcacctgggagccgaggccctatgaccaggccaaggagacgggcgctccagggtcccagccacctgtcccccccatggagctgaggccctggttgctatgggtggtagcagcaacaggaaccttggtcctgctagcagctgatgctcagggccagaaggtcttcaccaacacgtgggctgtgcgcatccctggaggcccagcggtggccaacagtgtggcacggaagcatgggttcctcaacctgggccagatcttcggggactattaccacttctggcatcgaggagtgacgaagcggtccctgtcgcctcaccgcccgcggcacagccggctgcagagggagcctcaagtacagtggctggaacagcaggtggcaaagcgacggactaaacgggacgtgtaccaggagcccacagaccccaagtttcctcagcagtggtacctgtctggtgtcactcagcgggacctgaatgtgaaggcggcctgggcgcagggctacacagggcacggcattgtggtctccattctggacgatggcatcgagaagaaccacccggacttggcaggcaattatgatcctggggccagttttgatgtcaatgaccaggaccctgacccccagcctcggtacacacagatgaatgacaacaggcacggcacacggtgtgcgggggaagtggctgcggtggccaacaacggtgtctgtggtgtaggtgtggcctacaacgcccgcattggaggggtgcgcatgctggatggcgaggtgacagatgcagtggaggcacgctcgctgggcctgaaccccaaccacatccacatctacagtgccagctggggccccgaggatgacggcaagacagtggatgggccagcccgcctcgccgaggaggccttcttccgtggggttagccagggccgaggggggctgggctccatctttgtctgggcctcggggaacgggggccgggaacatgacagctgcaactgcgacggctacaccaacagtatctacacgctgtccatcagcagcgccacgcagtttggcaacgtgccgtggtacagcgaggcctgctcgtccacactggccacgacctacagcagtggcaaccagaatgagaagcagatcgtgacgactgacttgcggcagaagtgcacggagtctcacacgggcacctcagcctctgcccccttagcagccggcatcattgctctcaccctggaggccaataagaacctcacatggcgggacatgcaacacctggtggtacagacctcgaagccagcccacctcaatgccaacgactgggccaccaatggtgtgggccggaaagtgagccactcatatggctacgggcttttggacgcaggcgccatggtggccctggcccagaattggaccacagtggccccccagcggaagtgcatcatcgacatcctcaccgagcccaaagacatcgggaaacggctcgaggtgcggaagaccgtgaccgcgtgcctgggcgagcccaaccacatcactcggctggagcacgctcaggcgcggctcaccctgtcctataatcgccgtggcgacctggccatccacctggtcagccccatgggcacccgctccaccctgctggcagccaggccacatgactactccgcagatgggtttaatgactgggccttcatgacaactcattcctgggatgaggatccctctggcgagtgggtcctagagattgaaaacaccagcgaagccaacaactatgggacgctgaccaagttcaccctcgtactctatggcaccgcccctgaggggctgcccgtacctccagaaagcagtggctgcaagaccctcacgtccagtcaggcctgtgtggtgtgcgaggaaggcttctccctgcaccagaagagctgtgtccagcactgccctccaggcttcgccccccaagtcctcgatacgcactatagcaccgagaatgacgtggagaccatccgggccagcgtctgcgccccctgccacgcctcatgtgccacatgccaggggccggccctgacagactgcctcagctgccccagccacgcctccttggaccctgtggagcagacttgctcccggcaaagccagagcagccgagagtccccgccacagcagcagccacctcggctgcccccggaggtggaggcggggcaacggctgcgggcagggctgctgccctcacacctgcctgaggtggtggccggcctcagctgcgccttcatcgtgctggtcttcgtcactgtcttcctggtcctgcagctgcgctctggctttagttttcggggggtgaaggtgtacaccatggaccgtggcctcatctcctacaaggggctgccccctgaagcctggcaggaggagtgcccgtctgactcagaagaggacgagggccggggcgagaggaccgcctttatcaaagaccagagcgccctctgatgagcccactgcccaccccctcaagccaatcccctccttgggcactttttaattcaccaaagtatttttttatcttgggactgggtttggaccccagctgggaggcaagaggggtggagactgtttcccatcctaccctcgggcccacctggccacctgaggtgggcccaggaccagctggggcgtggggagggccgtaccccaccctcagcaccccttccatgtggagaaaggagtgaaacctttagggcagcttgccccggccccggccccagccagagttcctgcggagtgaagaggggcagcccttgcttgttgggattcctgacccaggccgcagctcttgcccttccctgtccctctaaagcaataatggtcccatccaggcagtcgggggctggcctaggagatatctgagggaggaggccacctctccaagggcttctgcaccctccaccctgtcccccagctctggtgagtcttggcggcagcagccatcataggaagggaccaaggcaaggcaggtgcctccaggtgtgcacgtggcatgtggcctgtggcctgtgtcccatgacccacccctgtgctccgtgcctccaccaccactggccaccaggctggcgcagccaaggccgaagctctggctgaaccctgtgctggtgtcctgaccaccctcccctctcttgcacccgcctctcccgtcagggcccaagtccctgttttctgagcccgggctgcctgggctgttggcactcacagacctggagcccctgggtgggtggtggggaggggcgctggcccagccggcctctctggcctcccacccgatgctgctttcccctgtggggatctcaggggctgtttgaggatatattttcactttgtgattatttcactttagatgctgatgatttgtttttgtatttttaatgggggtagcagctggactacccacgttctcacacccaccgtccgccctgctcctccctggctgccctggccctgaggtgtgggggctgcagcatgttgctgaggagtgaggaatagttgagccccaagtcctgaagaggcgggccagccaggcgggctcaaggaaagggggtcccagtgggaggggcaggctgacatctgtgtttcaagtggggctcgccatgccgggggttcataggtcactggctctccaagtgccagaggtgggcaggtggtggcactgagcccccccaacactgtgccctggtggagaaagcactgacctgtcatgcccccctcaaacctcctcttctgacgtgccttttgcacccctcccattaggacaatcagtcccctcccatctgggagtccccttttcttttctaccctagccattcctggtacccagccatctgcccaggggtgccccctcctctcccatccccctgccctcgtggccagcccggctggttttgtaagatactgggttggtgcacagtgatttttttcttgtaatttaaacaggcccagcattgctggttctatttaatggacatgagataatgttagaggttttaaagtgattaaacgtgcagactatgcaaaccag

SEQ ID NO: 473 - protein, 787 aa, Homo Sapiens [sequence omitted]

SEQ ID NO: 474 - DNA, 2561 bp, Homo Sapiens
gcctgagtgagtctctggcgtcccaaattgcctgtttttctcgcaggctctattccgttcgctggttcgccacctcaggggaacgatggccatggagtccacagccactgccgccgtcgccgcggacgtggtttctgccgacaaaattgaagatgtccctgctccttctacatctgcagataaagtggagagtctggatgtggatagtgaagctaagaaactattgggtttaggacagaaacatctggtgatgggggatattccagcagctgtcaatgcattccaggaagcagctagtcttttaggtaagaagtatggagagacagctaatgagtgtggagaagccttctttttctatgggaaatcacttctggagttggcaagaatggagaatggtgtgttgggaaacgccttggaaggtgtgcatgtggaagaggaagaaggagaaaaaacagaagatgaatctctggtagaaaataatgataacatagatgaggaagcaagggaagagttgagagaacaggtttatgacgccatgggagaaaaagaagaagccaaaaaaacagaagacaagtctttggcaaagcctgaaactgataaagaacaggacagtgaaatggagaagggtggaagagaagatatggatataagtaaatctgcagaggagccacaggaaaaagttgacttgactctagattggttaactgaaacctctgaagaggcaaaaggaggagcagcaccagaaggaccgaatgaagctgaggtcacttctgggaagccagaacaggaagtaccagatgctgaggaagaaaaatcagtttctggaactgatgtccaagaagagtgcagagaaaaaggaggtcaggagaagcagggagaggtaattgtgagcatagaggagaagccaaaagaagtttcagaagagcagcctgtggtgactctagaaaagcagggcactgcagtggaggtagaagcagagtctttagacccgacagtcaagccagtggatgtgggtggggacgagccagaggagaaggtagttacctctgaaaacgaggcaggaaaggcggttcttgaacaactggtaggtcaagaagtaccacctgctgaagagtcaccagaggtgcaaacagaggctgcagaggcctcagctgtagaggctggatcagaagtctctgaaaagcctgggcaggaggctccagttctccctaaggatggtgcagtcaatggaccgtcagttgtaggagatcagactcctattgaaccacagacttctatagaaagactgacagaaacaaaagatggctcaggactagaggagaaggtcagggcaaagctggttcctagtcaggaggagactaagctgtctgtagaagagtctgaggcagctggagatggggttgataccaaggtagcccagggagctactgagaaatcacctgaagacaaagttcagatagctgctaatgaagagacacaagagagagaagaacagatgaaagagggtgaagaaactgaaggctcggaagaggatgataaagaaaatgataagactgaagaaatgccaaatgattcagtccttgaaaacaagtctcttcaagaaaatgaggaggaggagattgggaacctagagcttgcctgggatatgctggatttagcaaagatcatttttaaaaggcaagaaacaaaagaagcacagctttatgctgcccaggcacatcttaaactcggagaagttagtgttgaatctgaaaactatgtgcaagctgtggaggagttccagtcctgccttaacctgcaggaacagtacctggaagcccacgaccgtctgcttgcagagacccactaccagctgggcttggcttatgggtacaactctcagtatgatgaggcagtggcacagttcagcaaatctattgaagtcattgagaacagaatggctgtactaaacgagcaggtgaaggaggctgaaggatcgtctgaatacaagaaagaaattgaggaactaaaggaactgctacccgaaattagagagaagatagaagatgcaaaggagtctcagcgtagtgggaatgtagctgaactggctctgaaagctactctggtggagagttctacttcaggtttcactcctggtggaggaggctcttcagtctccatgattgccagtagaaagccaacagacggtgcttcctcatcaaattgtgtgactgatatttcccaccttgtcagaaagaagaggaaaccagaggaagagagtccccggaaagatgatgcaaagaaagccaaacaagagccggaggtgaacggaggcagtggggatgctgtcccgagtggaaatgaagtttcggaaaacatggaggaggaggctgagaatcagctgaaacgcggagcagcagtggaggggacactggaggctggagctacagttgaaagcactgcatgttaagagggggcacagcctcctcccaagggaaagtgtttttgtatataatgtattttttcacttttggaggattctttttgtataacttcaataaagattgtaagcaaaaaaaaaa

SEQ ID NO: 475 - protein, 232 aa, Homo Sapiens
MEHTGHYLHLAFLMTTVFSLSPGTKANYTRLWANSTSSWDSVIQNKTGRNQNENINTNPITPEVDYKGNSTNMPETSHIVALTSKSEQELYIPSVVSNSPSTVQSIENTSKSHGEIFKKDVCAENNNNMAMLICLIIIAVLFLICTFLFLSTVVLANKVSSLRRSKQVGKRQPRSNGDFLASGLWPAESDTWKRTKQLTGPNLVMQSTGVLTATRERKDEEGTEKLTNKQIG

SEQ ID NO: 476 - DNA, 1563 bp, Homo Sapiens
agttgcagtggaaagaaatgtgtcatctgtggtttggtttttaaaagtggaaaactagctgcacatatccttttttactgcagatttactttaaggctcatattctccaagtctattctgctttaaaaagaagacaagaaaagaagtggtttatcaaaatcacgttataatcagattttgaccaagcattttgtaagattgccaagtatgcccacggacatggaacacacaggacattacctacatcttgcctttctgatgacaacagttttttctttgtctcctggaacaaaagcaaactatacccgtctgtgggctaacagtacttcttcctgggattcagttattcaaaacaagacaggcagaaaccaaaatgaaaacattaacacaaaccctataactcctgaagtagattataaaggtaattctacaaacatgcctgaaacatctcacatcgtagctttaacttctaaatctgaacaggagctttatataccttctgtcgtcagcaacagtccttcaacagtacagagcattgaaaacacaagcaaaagtcatggtgaaattttcaaaaaggatgtctgtgcggaaaacaacaacaacatggctatgctaatttgcttaattataattgcagtgctttttcttatctgtacctttctatttctatcaactgtggttttggcaaacaaagtctcttctctcagacgatcaaaacaagtaggcaagcgtcagcctagaagcaatggcgattttctggcaagcggtctatggcccgctgaatcagacacttggaaaagaacaaaacagctcacaggacccaacctagtgatgcaatctactggagtgctcacagctacaagggaaagaaaagatgaagaaggaactgaaaaacttactaacaaacagataggttagtgaagaaaaatgcaaagtagcaatgagaaggcttatggagtaaaaatgaagtcagttggtatttaatcccaaagtgttgttctgattatctaaaatttgacatggtagaccttgcaatttagaatcaagcaggtgagacagggagaagtatgcctgcttaattatttaaactgtgtacttttgttttgacactgaatattttaaaaagcaaataataaaataactaagcatttgaggaaaattttaaggataaattgaggaaactgattaatagagatagcaagggataattaaataaatattccctatgtagcaacagtggttagatgatctttgtctgaatgtaataaaactttgaatagttttagtgtgtccttaaagccaagtatatgctttaacatcaaatggaagtcaaattcctaatgcatagatagagagagctaaactgtgtaatttaatggtatcttccttgctggatgtggcagaatccacaccagcttatcaaccaacacagctaattttagaataggtcctttatctttccatatggcacacgtaagaaagtgtttttctactattaatattaaattaaaacctttacttttgtataataaattaaaactcagaataaacctgtgaccacgt

SEQ ID NO: 477 - protein, 408 aa, Homo Sapiens
MAENGDNEKMAALEAKICHQIEYYFGDFNLPRDKFLKEQIKLDEGWVPLEIMIKFNRLNRLTTDFNVIVEALSKSKAELMEISEDKTKIRRSPSKPLPEVTDEYKNDVKNRSVYIKGFPTDATLDDIKEWLEDKGQVLNIQMRRTLHKAFKGSIFVVFDSIESAKKFVETPGQKYKETDLLILFKDDYFAKKNEERKQNKVEAKLRAKQEQEAKQKLEEDAEMKSLEEKIGCLLKFSGDLDDQTCREDLHILFSNHGEIKWIDFVRGAKEGIILFKEKAKEALGKAKDANNGNLQLRNKEVTWEVLEGEVEKEALKKIIEDQQESLNKWKSKGRRFKGKGKGNKAAQPGSGKGKVQFQGKKTKFASDDEHDEHDENGATGPVKRAREETDKEEPASKQQKTENGAGDQ

SEQ ID NO: 478 - DNA, 1619 bp, Homo Sapiens
ggagtcgttgttgttgctgtttgtgagcctgtgcggcggcttctgtgggccggaaccttaaagatagccgcaatggctgaaaatggtgataatgaaaagatggctgccctggaggccaaaatctgtcatcaaattgagtattattttggcgacttcaatttgccacgggacaagtttctaaaggaacagataaaactggatgaaggctgggtacctttggagataatgataaaattcaacaggttgaaccgtctaacaacagactttaatgtaattgtggaagcattgagcaaatccaaggcagaactcatggaaatcagtgaagataaaactaaaatcagaaggtctccaagcaaacccctacctgaagtgactgatgagtataaaaatgatgtaaaaaacagatctgtttatattaaaggcttcccaactgatgcaactcttgatgacataaaagaatggttagaagataaaggtcaagtactaaatattcagatgagaagaacattgcataaagcatttaagggatcaatttttgttgtgtttgatagcattgaatctgctaagaaatttgtagagacccctggccagaagtacaaagaaacagacctgctaatacttttcaaggacgattactttgccaaaaaaaatgaagaaagaaaacaaaataaagtggaagctaaattaagagctaaacaggagcaagaagcaaaacaaaagttagaagaagatgctgaaatgaaatctctagaagaaaagattggatgcttgctgaaattttcgggtgatttagatgatcagacctgtagagaagatttacacatacttttctcaaatcatggtgaaataaaatggatagacttcgtcagaggagcaaaagaggggataattctatttaaagaaaaagccaaggaagcattgggtaaagccaaagatgcaaataatggtaacctacaattaaggaacaaagaagtgacttgggaagtactagaaggagaggtggaaaaagaagcactgaagaaaataatagaagaccaacaagaatccctaaacaaatggaagtcaaaaggtcgtagatttaaaggaaaaggaaagggtaataaagctgcccagcctgggtctggtaaaggaaaagtacagtttcagggcaagaaaacgaaatttgctagtgatgatgaacatgatgaacatgatgaaaatggtgcaactggacctgtgaaaagagcaagagaagaaacagacaaagaagaacctgcatccaaacaacagaaaacagaaaatggtgctggagaccagtagtttagtaaaccaattttttattcattttaaataggttttaaacgacttttgtttgcggggcttttaaaaggaaaaccgaattaggtccacttcaatgtccacctgtgagaaaggaaaaatttttttgttgtttaacttgtctttttgttatgcaaatgagatttctttgaatgtattgttctgtttgtgttatttcagatgattcaaatatcaaaaggaagattcttccattaaattgcctttgtaatatgagaatgtattagtacaaactaactaataaaatatatactatatgaaaagagcaaaaaaaaaaaaaaaaa

SEQ ID NO: 479 - protein, 109 aa, Homo Sapiens
MLKLTPLPSKMKVSAALLCLLLMAATFSPQGLAQPDSVSIPITCCFNVINRKIPIQRLESYTRITNIQCPKEAVIFKTQRGKEVCADPKERWVRDSMKHLDQIFQNLKP

SEQ ID NO: 480 - DNA, 330 bp, Homo Sapiens
atgctgaagctcacacccttgccctccaagatgaaggtttctgcagcgcttctgtgcctgctgctcatggcagccactttcagccctcagggacttgctcagccagattcagtttccattccaatcacctgctgctttaacgtgatcaataggaaaattcctatccagaggctggagagctacacaagaatcaccaacatccaatgtcccaaggaagctgtgatcttcaagacccaacggggcaaggaggtctgtgctgaccccaaggagagatgggtcagggattccatgaagcatctggaccaaatatttcaaaatctgaagccatga

SEQ ID NO: 481 - protein, 107 aa, Homo Sapiens
MARATLSAAPSNPRLLRVALLLLLLVAASRRAAGAPLATELRCQCLQTLQGIHLKNIQSVKVKSPGPHCAQTEVIATLKNGQKACLNPASPMVKKIIEKMLKNGKSN

SEQ ID NO: 482 - DNA, 1110 bp, Homo Sapiens
gacagagcccgggccacggagctccttgccagctctcctcctcgcacagccgctcgaaccgcctgctgagccccatggcccgcgccacgctctccgccgcccccagcaatccccggctcctgcgggtggcgctgctgctcctgctcctggtggccgccagccggcgcgcagcaggagcgcccctggccactgaactgcgctgccagtgcttgcagaccctgcagggaattcacctcaagaacatccaaagtgtgaaggtgaagtcccccggaccccactgcgcccaaaccgaagtcatagccacactcaagaatgggcagaaagcttgtctcaaccccgcatcgcccatggttaagaaaatcatcgaaaagatgctgaaaaatggcaaatccaactgaccagaaggaaggaggaagcttattggtggctgttcctgaaggaggccctgccttacaggaacagaagaggaaagagagacacagctgcagaggccacctggcttgcgcctaatgtgtttgagcatacttaggagaagtcttctatttatttatttatttatttatttgtttgttttagaagattctatgttaatattttatgtgtaaaataaggttatgattgaatctacttgcacactctcccattatatttattgtttattttaggtcaaacccaagttagttcaatcctgattcatatttaatttgaagatagaaggtttgcagatattctctagtcatttgttaatatttcttcgtgatgacatatcacatgtcagccactgtgatagaggctgaggaatccaagaaaatggccagtaagatcaatgtgacggcagggaaatgtatgtgtgtctattttgtaactgtaaagatgaatgtcagttgttatttattgaaatgatttcacagtgtgtggtcaacatttctcatgttgaagctttaagaactaaaatgttctaaatatcccttggcattttatgtctttcttgtaagatactgccttgtttaatgttaattatgcagtgtttccctctgtgttagagcagagaggtttcgatatttattgatgttttcacaaagaacaggaaaataaaatatttaaaaatat

SEQ ID NO: 483 - protein, 119 aa, Homo Sapiens
MKLVRFLMKLSHETVTIELKNGTQVHGTITGVDVSMNTHLKAVKMTLKNREPVQLETLSIRGNNIRYFILPDSLPLDTLLVDVEPKVKSKKREAVAGRGRGRGRGRGRGRGRGRGGPRR

SEQ ID NO: 484 - DNA, 1633 bp, Homo Sapiens
gaattccccccccccccccagtgctccgcgcgctcttgacgtccggagcccctggagtaggcgcttccggccattcatactgcagtcggtcagtgttcggttgaaggattctgtgtgctgtcggacccagagggtgacggcgccgctaggatgaagctcgtgagatttttgatgaaattgagtcatgaaactgtaaccattgaattgaagaacggaacacaggtccatggaacaatcacaggtgtggatgtcagcatgaatacacatcttaaagctgtgaaaatgaccctgaagaacagagaacctgtacagctggaaacgctgagtattcgaggaaataacattcggtattttattctaccagacagtttacctctggatacactacttgtggatgttgaacctaaggtgaaatctaagaaaagggaagctgttgcaggaagaggcagaggaagaggaagaggaagaggacgtggccgtggcagaggaagagggggtcctaggcgataatgtctctcaagatttcaaagtcatatgagatttgggatattttttgtacaggttgtgtttgtttatgtcagtttttaataaacataaatgtgggacagagctgtctatttagtatatcaaagttttagtagtttcctccacattcacgaaattaccacagtgagagctaagcatttctactgggcagtttcatttttagttgatcaggttttaagtttttgaactaaaatttttctttttctttttatgatgaataaggttaaaataaaagccttagacaaattaaatttggcagagtttaattgagcaaaggacaattcacaaatcaggtagcccctgaaccataataggctcagaggcttcagcccagctgcatagttgaagatttatggacagaaggaaagtgatgtatggaaaatggaagtgagatacagcaacagccggattagttacagttcagcgtttgccttatttgaatatggtttgaacagttcgctgtctttggttggctgaaacttagtgattgccacaagagtagggtaccgtctgtttacacgtccagttaggctacagttctatgtactgagaaacctttaagctgaacttgagatatgtaaagagactttaggctaaacttaacaatatatataggaatatatcccttctacttcacatgcactgaatatgcattttattgctttactcttcattctgtggcacctacccacaggggaagtaagaagtttgttttggtatttcggaaactaaagtccttatgggatggggtctagaattgattctcctttcctgagttttactccacggagtcttaggtacctggtaaaaagttgtcttctaaattaagggtcattgctttgttgtctagctgctaatgtcttacttttgtttcttttgctttttaatcagttcttaataggatatagttttatgttttccaagttataacttggagttaatggtcactagattatcagttatgagcagtgttaaaatctcctattaatgtgtaatgtacctgtcagtgcctcctttattaaggggttctttgagaataaaagagaaaagacctactttatttgacagcaaaaaaaaaaaggaattc

SEQ ID NO: 485 - protein, 107 aa, Homo Sapiens
MARAALSAAPSNPRLLRVALLLLLLVAAGRRAAGASVATELRCQCLQTLQGIHPKNIQSVNVKSPGPHCAQTEVIATLKNGRKACLNPASPIVKKIIEKMLNSDKSN

SEQ ID NO: 486 - DNA, 1103 bp, Homo Sapiens
cacagagcccgggccgcaggcacctcctcgccagctcttccgctcctctcacagccgccagacccgcctgctgagccccatggcccgcgctgctctctccgccgcccccagcaatccccggctcctgcgagtggcactgctgctcctgctcctggtagccgctggccggcgcgcagcaggagcgtccgtggccactgaactgcgctgccagtgcttgcagaccctgcagggaattcaccccaagaacatccaaagtgtgaacgtgaagtcccccggaccccactgcgcccaaaccgaagtcatagccacactcaagaatgggcggaaagcttgcctcaatcctgcatcccccatagttaagaaaatcatcgaaaagatgctgaacagtgacaaatccaactgaccagaagggaggaggaagctcactggtggctgttcctgaaggaggccctgcccttataggaacagaagaggaaagagagacacagctgcagaggccacctggattgtgcctaatgtgtttgagcatcgcttaggagaagtcttctatttatttatttattcattagttttgaagattctatgttaatattttaggtgtaaaataattaagggtatgattaactctacctgcacactgtcctattatattcattctttttgaaatgtcaaccccaagttagttcaatctggattcatatttaatttgaaggtagaatgttttcaaatgttctccagtcattatgttaatatttctgaggagcctgcaacatgccagccactgtgatagaggctggcggatccaagcaaatggccaatgagatcattgtgaaggcaggggaatgtatgtgcacatctgttttgtaactgtttagatgaatgtcagttgttatttattgaaatgatttcacagtgtgtggtcaacatttctcatgttgaaactttaagaactaaaatgttctaaatatcccttggacattttatgtctttcttgtaaggcatactgccttgtttaatggtagttttacagtgtttctggcttagaacaaaggggcttaattattgatgttttcatagagaatataaaaataaagcacttatag

SEQ ID NO: 487 - protein, 372 aa, Homo Sapiens [sequence omitted]

SEQ ID NO: 488 - DNA, 2324 bp, Homo Sapiens
ctccctttgggcaaggacctgagacccttgtgctaagtcaagaggctcaatgggctgcagaagaactagagaaggaccaagcaaagccatgatatttccatggaaatgtcagagcacccagagggacttatggaacatcttcaagttgtgggggtggacaatgctctgttgtgatttcctggcacatcatggaaccgactgctggacttaccattattctgaaaaacccatgaactggcaaagggctagaagattctgccgagacaattacacagatttagttgccatacaaaacaaggcggaaattgagtatctggagaagactctgcctttcagtcgttcttactactggataggaatccggaagataggaggaatatggacgtgggtgggaaccaacaaatctcttactgaagaagcagagaactggggagatggtgagcccaacaacaagaagaacaaggaggactgcgtggagatctatatcaagagaaacaaagatgcaggcaaatggaacgatgacgcctgccacaaactaaaggcagccctctgttacacagcttcttgccagccctggtcatgcagtggccatggagaatgtgtagaaatcatcaataattacacctgcaactgtgatgtggggtactatgggccccagtgtcagtttgtgattcagtgtgagcctttggaggccccagagctgggtaccatggactgtactcaccctttgggaaacttcagcttcagctcacagtgtgccttcagctgctctgaaggaacaaacttaactgggattgaagaaaccacctgtggaccatttggaaactggtcatctccagaaccaacctgtcaagtgattcagtgtgagcctctatcagcaccagatttggggatcatgaactgtagccatcccctggccagcttcagctttacctctgcatgtaccttcatctgctcagaaggaactgagttaattgggaagaagaaaaccatttgtgaatcatctggaatctggtcaaatcctagtccaatatgtcaaaaattggacaaaagtttctcaatgattaaggagggtgattataaccccctcttcattccagtggcagtcatggttactgcattctctgggttggcatttatcatttggctggcaaggagattaaaaaaaggcaagaaatccaagagaagtatgaatgacccatattaaatcgcccttggtgaaagaaaattcttggaatactaaaaatcatgagatcctttaaatccttccatgaaacgttttgtgtggtggcacctcctacgtcaaacatgaagtgtgtttccttcagtgcatctgggaagatttctacctgaccaacagttccttcagcttccatttcgcccctcatttatccctcaacccccagcccacaggtgtttatacagctcagctttttgtcttttctgaggagaaacaaataagaccataaagggaaaggattcatgtggaatataaagatggctgactttgctctttcttgactcttgttttcagtttcaattcagtgctgtacttgatgacagacacttctaaatgaagtgcaaatttgatacatatgtgaatatggactcagttttcttgcagatcaaatttcacgtcgtcttctgtatactgtggaggtacactcttatagaaagttcaaaaagtctacgctctcctttctttctaactccagtgaagtaatggggtcctgctcaagttgaaagagtcctatttgcactgtagcctcgccgtctgtgaattggaccatcctatttaactggcttcagcctccccaccttcttcagccacctctctttttcagttggctgacttccacacctagcatctcatgagtgccaagcaaaaggagagaagagagaaatagcctgcgctgttttttagtttgggggttttgctgtttccttttatgagacccattcctatttcttatagtcaatgtttcttttatcacgatattattagtaagaaaacatcactgaaatgctagctgcaagtgacatctctttgatgtcatatggaagagttaaaacaggtggagaaattccttgattcacaatgaaatgctctcctttcccctgcccccagaccttttatccacttacctagattctacatattctttaaatttcatctcaggcctccctcaaccccaccacttcttttataactagtcctttactaatccaacccatgatgagctcctcttcctggcttcttactgaaaggttaccctgtaacatgcaattttgcatttgaataaagcctgctttttaagtgttaa

SEQ ID NO: 489 - skipped

SEQ ID NO: 490 - DNA, 50 bp, Homo Sapiens
acgcagcgagccagggatgtgagcggcgccccgcggcatggcagcctcag

SEQ ID NO: 491 - skipped

SEQ ID NO: 492 - DNA, 417 bp, Homo Sapiens
gggtgcccagaggatgcgacatcctcatcgtctacagcccggatgccgaggaatggtgccagtacctgcagaccctgttcctgtccagtcggcaggtccgcagccagaagatactgactcacaggctgggccccgaggcctccttctcggcagaggacctaagccttttcctcagcacccgctgtgtcgtggtgctgctgtccgcggagctggtgcagcacttccacaagcccgccttgctgcccctgctgcagagagctttccatcctccgcaccgcgtggtcaggctgctctgcggcgtgcgggacagcgaggagttcctagacttctttccagattgggcccattggcaggagctcacctgtgacgatgagccagagacctacgtggcagctgtgaaaaaagccatttccgaag

SEQ ID NO: 493 - skipped

SEQ ID NO: 494 - DNA, 93 bp, Homo Sapiens
agacagcgtctcataatgctgcccaggctggtctcaaactcctgagctcaagcaatcctcccgactcggcttcccaaagcacttggattacag

SEQ ID NO: 495 - skipped

SEQ ID NO: 496 - DNA, 137 bp, Homo Sapiens
attctggctgtgactcagtcactgacactgagcctgaggacgagaaggttgtttcctactcgaagcagcagaacctgccgacggtgacttcacctgggaacctgatggtggtgcagccggaccgcattcgctgtggg

SEQ ID NO: 497 - skipped

SEQ ID NO: 498 - DNA, 145 bp, Homo Sapiens
gcagaaaccactgtctatgttattgtgagatgtaagctggatgacagggtggcgacagaagcagagttttctcctgaggattctccctctgtaaggatggaagccaaggtggagaatgagtacaccatttcagtgaaggctccca

SEQ ID NO: 499 - skipped

SEQ ID NO: 500 - DNA, 114 bp, Homo Sapiens
aaacacagtttcacctcccatgatttttccctccttctgtgaccactggcctttgtgtaaagtgccttaaacccgaattttcttcctgttcattgaggcactgggcctacagta

SEQ ID NO: 501 - skipped

SEQ ID NO: 502 - DNA, 143 bp, Homo Sapiens
acctttcatctgggaacgtttctctgaagatatattctggagacttagtggtgtgtgaaaccgttatcagctattatactgacatggaagaaattgggaatttattgtccaatgccgcgaatcctgtggaattcatgtgtcag

SEQ ID NO: 503 - skipped

SEQ ID NO: 504 - DNA, 133 bp, Homo Sapiens
gcctttaaaattgtgccctacaacacagagacccttgataaactgctaaccgaatccctgaagaacaatatccctgcaagcggactgcacctctttggaatcaaccagctggaagaagaagatatgatgacaa

SEQ ID NO: 505 - skipped

SEQ ID NO: 506 - DNA, 197 bp, Homo Sapiens
atcagagggatgaagagctgcccaccctgttgcattttgctgcgaagtatggactgaagaacctcactgccttgttgctcacctgcccaggagccctgcaggcgtacagcgtggccaacaagcatggccactaccccaacaccatcgctgagaaacacggcttcagggacctgcggcagttcatcgacgagtatgtg

SEQ ID NO: 507 - skipped

SEQ ID NO: 508 - DNA, 190 bp, Homo Sapiens
gaaacggtggacatgctcaagagtcacattaaagaggaactgatgcacggggaggaggctgatgctgtgtacgagtccatggcccacctttccacagacctgcttatgaaatgctcgctcaaccccggctgtgacgaggatctctatgagtccatggctgcctttgtcccagctgccactgaagacctct

SEQ ID NO: 509 - skipped

SEQ ID NO: 510 - DNA, 96 bp, Homo Sapiens
atgttgaaatgcttcaggccagtacatctaacccaatccctggagatggtttctctcgggccactaaggactctatgatccgcaagtttttagaag

SEQ ID NO: 511 - skipped

SEQ ID NO: 512 - DNA, 198 bp, Homo Sapiens
gcaacagcatgggaatgaccaatctggagagagatcagtgccatcttggtcaggaagaagatgtttatcacacggtggatgacgatgaggccttttctgtggacctggccagcaggccccctgtcccagtgcccagaccagagaccactgctcctggtgctcaccagctgcctgacaacgaaccatacatttttaaag

SEQ ID NO: 513 - skipped

SEQ ID NO: 514 - DNA, 66 bp, Homo Sapiens
tttttgcagaaaaaagtcaagagcggcctgggaatttctacgtttcctcagagagcatcaggaaag

SEQ ID NO: 515 - skipped

SEQ ID NO: 516 - DNA, 206 bp, Homo Sapiens
ggccgcccgtcagaccatggagggacaggccccagtcgagtatatatgacccttttgcgggaatgaaaacgccaggccagcggcagcttatcaccctccaggagcaggtgaagctgggcattgtcaacgtggatgaggctgtgctccacttcaaagagtggcagctcaaccagaagaaacgatcggagtcctttcgtttccagcag

SEQ ID NO: 517 - skipped

SEQ ID NO: 518 - DNA, 73 bp, Homo Sapiens
gaaaatcttaaacggctaagagacagcatcacccgaagacagagagagaagcaaaaatcaggaaagcagacag

SEQ ID NO: 519 - skipped

SEQ ID NO: 520 - DNA, 156 bp, Homo Sapiens
acttggagatcacggtcccaattcggcactcacagcacctgcctgcaaaagtggagtttggagtctatgagagtggccccaggaaaagtgtcattccccctaggacggagctgagacgaggagactggaaaacagacagcacctccagcacagcaa

SEQ ID NO: 521 - skipped

SEQ ID NO: 522 - DNA, 71 bp, Homo Sapiens
gtagcacaagtaaccgctccagcacccggagcctcctcagtgtgagcagcgggatggaaggggacaacgag

SEQ ID NO: 523 - skipped

SEQ ID NO: 524 - DNA, 119 bp, Homo Sapiens
gataatgaagtccctgaggttaccagaagtcgcagtccaggccccccacaagtggatgggacacccaccatgtccctcgagagaccccccagggtgcctccgagagctgcctcacagag

SEQ ID NO: 525 - skipped

SEQ ID NO: 526 - DNA, 2323 bp, Homo Sapiens
gcctccgaccagggagaccttccatcctcctccacctgttccacccagaggacgctgattccacctcctaaaacctgcctacttcaggactttaagactcacagtcttcagcctgttaatgatgtcttcatgttgagttttatagcatgactgttgaccttaagatccattctcattgctgataatgctgcagccctgctggtttgggcttgcctcgaagattttattaaggcacgaagaagtgaaaaactaagggcttcattcaccatcaccaagtatatcgaaccatatacttgtttgccaaaaggatgaagacttaatcgaaatacttacctctaatttgccatatcagaagcctaaaaagaatgatcataaatgtacttcaccagtgattttactgaaatgcacttatattagtctttatgtatttgctagttcagcctgatttctagaagaggttatagtgtgagacttgtagtattcaagtaagataagtgacctaattttaaaataattcttctacttttctgtatattcagcagggtatttaagtgctagggctggtcacacacaaccaactgaaaaagactagagggattagtacaaactcctcttatacagaaggcaaatctgaggttccacagaagtctggaaccaagactattcagttggttaaataaagaggttagtctagactgggcctgctcattctaggtcaccacattttccatctccaaatagccaggccctctctccctcaagaaatgcccagatgtagaaattcatcagtgcctattggtcttccagaattttccatcttccgtatctcccaggcatgagactaccaagtttgtttgttttctttccaatttgggaatttatacttcagtatggtttcaacgcagttatgtttccagagaacatctagaagtggctggaaaccagaagctggggattccagggaccccacttagtgctctatttcctttataggttttatttctggtcatagagagagaaggacctttgactttttcttcgttgaggcttctgaggaggaaaaacaaacctaaaatagaaatacagtcagcctttcaaatccatgggttctgtgtccgtggattcaaccaaccttggatcaaaaatatttgaaaaaaaatctacaaagtttcaaaaagcaaaacttgaatttgctgcatgccaagaagtatgttgaattcatgtaaatgaagtgatgtgtaggcattgtattagatattataagaaatctagaaatgatttaaagcatacaggaggatgtgcataggttatatgcaaatactatgctattttatatatgggacttgagcatttgtggattttgatactgggggatcctggaaccaatcccccatggataccaaagtacgactgtagttatctattttttacatacttattattaccaccatgctcagtaagtccatttttgcatggaatatggagccttaaaacatgtcatgaatttggagtccctggcacataaatctaccttcaaatcagaggtccttaatgatgcctaaacatacagtaaaattagaatcagaaatacttctttaaaaaatattcaaaatgtgtttgtttcccatgggattattctctatcccacacgaatgtaaaaaaatccacattaatgatccatttaagtatagttttattgggtccttttctaatgattaaaggttctttctcaatttcattcctcagtcctgcaagtaaggactcatactgaagagtactgaaacaaggacttcttgtcagaaacagcttctggaatcttgggttttgtttttgttttttgacaaaatacactattggccatgtccatcacgagagtgtttgtagtaattaattaccttgtacaggacctggcacttagtagcattcttcaaatgttccctcagtgatccttttactctccttgtcacttatttgggagaaataggggcacgtgagataagaagaagaataattttgatgttggtatgcttgccctgttacttatagacagtctttgtcataggcaaacttgaatttgatttaaaatagggctgggaaaaatattcaataactgtaagcccccttttggatgccaaacttagaattttgtacattctctgatgaacaagcatttagatcgtaacatggtaaagcctattaccagccaatgttgttagcatctttgtatgcacatcactgtttgtgcaatatatgaatattttgttgcattgtattcttatataaaaataagtagaaaacataaaattgaaattgctgatgagaa

SEQ ID NO: 527 - protein, 805 aa, Homo Sapiens
MAASGVPRGCDILIVYSPDAEEWCQYLQTLFLSSRQVRSQKILTHRLGPEASFSAEDLSLFLSTRCVVVLLSAELVQHFHKPALLPLLQRAFHPPHRVVRLLCGVRDSEEFLDFFPDWAHWQELTCDDEPETYVAAVKKAISEDSGCDSVTDTEPEDEKVVSYSKQQNLPTVTSPGNLMVVQPDRIRCGAETTVYVIVRCKLDDRVATEAEFSPEDSPSVRMEAKVENEYTISVKAPNLSSGNVSLKIYSGDLVVCETVISYYTDMEEIGNLLSNAANPVEFMCQAFKIVPYNTETLDKLLTESLKNNIPASGLHLFGINQLEEEDMMTNQRDEELPTLLHFAAKYGLKNLTALLLTCPGALQAYSVANKHGHYPNTIAEKHGFRDLRQFIDEYVETVDMLKSHIKEELMHGEEADAVYESMAHLSTDLLMKCSLNPGCDEDLYESMAAFVPAATEDLYVEMLQASTSNPIPGDGFSRATKDSMIRKFLEGNSMGMTNLERDQCHLGQEEDVYHTVDDDEAFSVDLASRPPVPVPRPETTAPGAHQLPDNEPYIFKVFAEKSQERPGNFYVSSESIRKGPPVRPWRDRPQSSIYDPFAGMKTPGQRQLITLQEQVKLGIVNVDEAVLHFKEWQLNQKKRSESFRFQQENLKRLRDSITRRQREKQKSGKQTDLEITVPIRHSQHLPAKVEFGVYESGPRKSVIPPRTELRRGDWKTDSTSSTASSTSNRSSTRSLLSVSSGMEGDNEDNEVPEVTRSRSPGPPQVDGTPTMSLERPPRVPPRAASQRPPTRETFHPPPPVPPRGR

SEQ ID NO: 528 - DNA, 4720 bp, Homo Sapiens
acgcagcgagccagggatgtgagcggcgccccgcggcatggcagcctcaggggtgcccagaggatgcgacatcctcatcgtctacagcccggatgccgaggaatggtgccagtacctgcagaccctgttcctgtccagtcggcaggtccgcagccagaagatactgactcacaggctgggccccgaggcctccttctcggcagaggacctaagccttttcctcagcacccgctgtgtcgtggtgctgctgtccgcggagctggtgcagcacttccacaagcccgccttgctgcccctgctgcagagagctttccatcctccgcaccgcgtggtcaggctgctctgcggcgtgcgggacagcgaggagttcctagacttctttccagattgggcccattggcaggagctcacctgtgacgatgagccagagacctacgtggcagctgtgaaaaaagccatttccgaagattctggctgtgactcagtcactgacactgagcctgaggacgagaaggttgtttcctactcgaagcagcagaacctgccgacggtgacttcacctgggaacctgatggtggtgcagccggaccgcattcgctgtggggcagaaaccactgtctatgttattgtgagatgtaagctggatgacagggtggcgacagaagcagagttttctcctgaggattctccctctgtaaggatggaagccaaggtggagaatgagtacaccatttcagtgaaggctcccaacctttcatctgggaacgtttctctgaagatatattctggagacttagtggtgtgtgaaaccgttatcagctattatactgacatggaagaaattgggaatttattgtccaatgccgcgaatcctgtggaattcatgtgtcaggcctttaaaattgtgccctacaacacagagacccttgataaactgctaaccgaatccctgaagaacaatatccctgcaagcggactgcacctctttggaatcaaccagctggaagaagaagatatgatgacaaatcagagggatgaagagctgcccaccctgttgcattttgctgcgaagtatggactgaagaacctcactgccttgttgctcacctgcccaggagccctgcaggcgtacagcgtggccaacaagcatggccactaccccaacaccatcgctgagaaacacggcttcagggacctgcggcagttcatcgacgagtatgtggaaacggtggacatgctcaagagtcacattaaagaggaactgatgcacggggaggaggctgatgctgtgtacgagtccatggcccacctttccacagacctgcttatgaaatgctcgctcaaccccggctgtgacgaggatctctatgagtccatggctgcctttgtcccagctgccactgaagacctctatgttgaaatgcttcaggccagtacatctaacccaatccctggagatggtttctctcgggccactaaggactctatgatccgcaagtttttagaaggcaacagcatgggaatgaccaatctggagagagatcagtgccatcttggtcaggaagaagatgtttatcacacggtggatgacgatgaggccttttctgtggacctggccagcaggccccctgtcccagtgcccagaccagagaccactgctcctggtgctcaccagctgcctgacaacgaaccatacatttttaaagtttttgcagaaaaaagtcaagagcggcctgggaatttctacgtttcctcagagagcatcaggaaagggccgcccgtcagaccatggagggacaggccccagtcgagtatatatgacccttttgcgggaatgaaaacgccaggccagcggcagcttatcaccctccaggagcaggtgaagctgggcattgtcaacgtggatgaggctgtgctccacttcaaagagtggcagctcaaccagaagaaacgatcggagtcctttcgtttccagcaggaaaatcttaaacggctaagagacagcatcacccgaagacagagagagaagcaaaaatcaggaaagcagacagacttggagatcacggtcccaattcggcactcacagcacctgcctgcaaaagtggagtttggagtctatgagagtggccccaggaaaagtgtcattccccctaggacggagctgagacgaggagactggaaaacagacagcacctccagcacagcaagtagcacaagtaaccgctccagcacccggagcctcctcagtgtgagcagcgggatggaaggggacaacgaggataatgaagtccctgaggttaccagaagtcgcagtccaggccccccacaagtggatgggacacccaccatgtccctcgagagaccccccagggtgcctccgagagctgcctcacagaggcctccgaccagggagaccttccatcctcctccacctgttccacccagaggacgctgattccacctcctaaaacctgcctacttcaggactttaagactcacagtcttcagcctgttaatgatgtcttcatgttgagttttatagcatgactgttgaccttaagatccattctcattgctgataatgctgcagccctgctggtttgggcttgcctcgaagattttattaaggcacgaagaagtgaaaaactaagggcttcattcaccatcaccaagtatatcgaaccatatacttgtttgccaaaaggatgaagacttaatcgaaatacttacctctaatttgccatatcagaagcctaaaaagaatgatcataaatgtacttcaccagtgattttactgaaatgcacttatattagtctttatgtatttgctagttcagcctgatttctagaagaggttatagtgtgagacttgtagtattcaagtaagataagtgacctaattttaaaataattcttctacttttctgtatattcagcagggtatttaagtgctagggctggtcacacacaaccaactgaaaaagactagagggattagtacaaactcctcttatacagaaggcaaatctgaggttccacagaagtctggaaccaagactattcagttggttaaataaagaggttagtctagactgggcctgctcattctaggtcaccacattttccatctccaaatagccaggccctctctccctcaagaaatgcccagatgtagaaattcatcagtgcctattggtcttccagaattttccatcttccgtatctcccaggcatgagactaccaagtttgtttgttttctttccaatttgggaatttatacttcagtatggtttcaacgcagttatgtttccagagaacatctagaagtggctggaaaccagaagctggggattccagggaccccacttagtgctctatttcctttataggttttatttctggtcatagagagagaaggacctttgactttttcttcgttgaggcttctgaggaggaaaaacaaacctaaaatagaaatacagtcagcctttcaaatccatgggttctgtgtccgtggattcaaccaaccttggatcaaaaatatttgaaaaaaaatctacaaagtttcaaaaagcaaaacttgaatttgctgcatgccaagaagtatgttgaattcatgtaaatgaagtgatgtgtaggcattgtattagatattataagaaatctagaaatgatttaaagcatacaggaggatgtgcataggttatatgcaaatactatgctattttatatatgggacttgagcatttgtggattttgatactgggggatcctggaaccaatcccccatggataccaaagtacgactgtagttatctattttttacatacttattattaccaccatgctcagtaagtccatttttgcatggaatatggagccttaaaacatgtcatgaatttggagtccctggcacataaatctaccttcaaatcagaggtccttaatgatgcctaaacatacagtaaaattagaatcagaaatacttctttaaaaaatattcaaaatgtgtttgtttcccatgggattattctctatcccacacgaatgtaaaaaaatccacattaatgatccatttaagtatagttttattgggtccttttctaatgattaaaggttctttctcaatttcattcctcagtcctgcaagtaaggactcatactgaagagtactgaaacaaggacttcttgtcagaaacagcttctggaatcttgggttttgtttttgttttttgacaaaatacactattggccatgtccatcacgagagtgtttgtagtaattaattaccttgtacaggacctggcacttagtagcattcttcaaatgttccctcagtgatccttttactctccttgtcacttatttgggagaaataggggcacgtgagataagaagaagaataattttgatgttggtatgcttgccctgttacttatagacagtctttgtcataggcaaacttgaatttgatttaaaatagggctgggaaaaatattcaataactgtaagcccccttttggatgccaaacttagaattttgtacattctctgatgaacaagcatttagatcgtaacatggtaaagcctattaccagccaatgttgttagcatctttgtatgcacatcactgtttgtgcaatatatgaatattttgttgcattgtattcttatataaaaataagtagaaaacataaaattgaaattgctgatgagaa

SEQ ID NO: 529 - protein, 540 aa, Homo Sapiens
MEEIGNLLSNAANPVEFMCQAFKIVPYNTETLDKLLTESLKNNIPASGLHLFGINQLEEEDMMTNQRDEELPTLLHFAAKYGLKNLTALLLTCPGALQAYSVANKHGHYPNTIAEKHGFRDLRQFIDEYVETVDMLKSHIKEELMHGEEADAVYESMAHLSTDLLMKCSLNPGCDEDLYESMAAFVPAATEDLYVEMLQASTSNPIPGDGFSRATKDSMIRKFLEGNSMGMTNLERDQCHLGQEEDVYHTVDDDEAFSVDLASRPPVPVPRPETTAPGAHQLPDNEPYIFKVFAEKSQERPGNFYVSSESIRKGPPVRPWRDRPQSSIYDPFAGMKTPGQRQLITLQEQVKLGIVNVDEAVLHFKEWQLNQKKRSESFRFQQENLKRLRDSITRRQREKQKSGKQTDLEITVPIRHSQHLPAKVEFGVYESGPRKSVIPPRTELRRGDWKTDSTSSTASSTSNRSSTRSLLSVSSGMEGDNEDNEVPEVTRSRSPGPPQVDGTPTMSLERPPRVPPRAASQRPPTRETFHPPPPVPPRGR

SEQ ID NO: 530 - DNA, 4085 bp, Homo Sapiens
aaacacagtttcacctcccatgatttttccctccttctgtgaccactggcctttgtgtaaagtgccttaaacccgaattttcttcctgttcattgaggcactgggcctacagtaacctttcatctgggaacgtttctctgaagatatattctggagacttagtggtgtgtgaaaccgttatcagctattatactgacatggaagaaattgggaatttattgtccaatgccgcgaatcctgtggaattcatgtgtcaggcctttaaaattgtgccctacaacacagagacccttgataaactgctaaccgaatccctgaagaacaatatccctgcaagcggactgcacctctttggaatcaaccagctggaagaagaagatatgatgacaaatcagagggatgaagagctgcccaccctgttgcattttgctgcgaagtatggactgaagaacctcactgccttgttgctcacctgcccaggagccctgcaggcgtacagcgtggccaacaagcatggccactaccccaacaccatcgctgagaaacacggcttcagggacctgcggcagttcatcgacgagtatgtggaaacggtggacatgctcaagagtcacattaaagaggaactgatgcacggggaggaggctgatgctgtgtacgagtccatggcccacctttccacagacctgcttatgaaatgctcgctcaaccccggctgtgacgaggatctctatgagtccatggctgcctttgtcccagctgccactgaagacctctatgttgaaatgcttcaggccagtacatctaacccaatccctggagatggtttctctcgggccactaaggactctatgatccgcaagtttttagaaggcaacagcatgggaatgaccaatctggagagagatcagtgccatcttggtcaggaagaagatgtttatcacacggtggatgacgatgaggccttttctgtggacctggccagcaggccccctgtcccagtgcccagaccagagaccactgctcctggtgctcaccagctgcctgacaacgaaccatacatttttaaagtttttgcagaaaaaagtcaagagcggcctgggaatttctacgtttcctcagagagcatcaggaaagggccgcccgtcagaccatggagggacaggccccagtcgagtatatatgacccttttgcgggaatgaaaacgccaggccagcggcagcttatcaccctccaggagcaggtgaagctgggcattgtcaacgtggatgaggctgtgctccacttcaaagagtggcagctcaaccagaagaaacgatcggagtcctttcgtttccagcaggaaaatcttaaacggctaagagacagcatcacccgaagacagagagagaagcaaaaatcaggaaagcagacagacttggagatcacggtcccaattcggcactcacagcacctgcctgcaaaagtggagtttggagtctatgagagtggccccaggaaaagtgtcattccccctaggacggagctgagacgaggagactggaaaacagacagcacctccagcacagcaagtagcacaagtaaccgctccagcacccggagcctcctcagtgtgagcagcgggatggaaggggacaacgaggataatgaagtccctgaggttaccagaagtcgcagtccaggccccccacaagtggatgggacacccaccatgtccctcgagagaccccccagggtgcctccgagagctgcctcacagaggcctccgaccagggagaccttccatcctcctccacctgttccacccagaggacgctgattccacctcctaaaacctgcctacttcaggactttaagactcacagtcttcagcctgttaatgatgtcttcatgttgagttttatagcatgactgttgaccttaagatccattctcattgctgataatgctgcagccctgctggtttgggcttgcctcgaagattttattaaggcacgaagaagtgaaaaactaagggcttcattcaccatcaccaagtatatcgaaccatatacttgtttgccaaaaggatgaagacttaatcgaaatacttacctctaatttgccatatcagaagcctaaaaagaatgatcataaatgtacttcaccagtgattttactgaaatgcacttatattagtctttatgtatttgctagttcagcctgatttctagaagaggttatagtgtgagacttgtagtattcaagtaagataagtgacctaattttaaaataattcttctacttttctgtatattcagcagggtatttaagtgctagggctggtcacacacaaccaactgaaaaagactagagggattagtacaaactcctcttatacagaaggcaaatctgaggttccacagaagtctggaaccaagactattcagttggttaaataaagaggttagtctagactgggcctgctcattctaggtcaccacattttccatctccaaatagccaggccctctctccctcaagaaatgcccagatgtagaaattcatcagtgcctattggtcttccagaattttccatcttccgtatctcccaggcatgagactaccaagtttgtttgttttctttccaatttgggaatttatacttcagtatggtttcaacgcagttatgtttccagagaacatctagaagtggctggaaaccagaagctggggattccagggaccccacttagtgctctatttcctttataggttttatttctggtcatagagagagaaggacctttgactttttcttcgttgaggcttctgaggaggaaaaacaaacctaaaatagaaatacagtcagcctttcaaatccatgggttctgtgtccgtggattcaaccaaccttggatcaaaaatatttgaaaaaaaatctacaaagtttcaaaaagcaaaacttgaatttgctgcatgccaagaagtatgttgaattcatgtaaatgaagtgatgtgtaggcattgtattagatattataagaaatctagaaatgatttaaagcatacaggaggatgtgcataggttatatgcaaatactatgctattttatatatgggacttgagcatttgtggattttgatactgggggatcctggaaccaatcccccatggataccaaagtacgactgtagttatctattttttacatacttattattaccaccatgctcagtaagtccatttttgcatggaatatggagccttaaaacatgtcatgaatttggagtccctggcacataaatctaccttcaaatcagaggtccttaatgatgcctaaacatacagtaaaattagaatcagaaatacttctttaaaaaatattcaaaatgtgtttgtttcccatgggattattctctatcccacacgaatgtaaaaaaatccacattaatgatccatttaagtatagttttattgggtccttttctaatgattaaaggttctttctcaatttcattcctcagtcctgcaagtaaggactcatactgaagagtactgaaacaaggacttcttgtcagaaacagcttctggaatcttgggttttgtttttgttttttgacaaaatacactattggccatgtccatcacgagagtgtttgtagtaattaattaccttgtacaggacctggcacttagtagcattcttcaaatgttccctcagtgatccttttactctccttgtcacttatttgggagaaataggggcacgtgagataagaagaagaataattttgatgttggtatgcttgccctgttacttatagacagtctttgtcataggcaaacttgaatttgatttaaaatagggctgggaaaaatattcaataactgtaagcccccttttggatgccaaacttagaattttgtacattctctgatgaacaagcatttagatcgtaacatggtaaagcctattaccagccaatgttgttagcatctttgtatgcacatcactgtttgtgcaatatatgaatattttgttgcattgtattcttatataaaaataagtagaaaacataaaattgaaattgctgatgagaa

SEQ ID NO: 531 - protein, 228 aa, Homo Sapiens
MAASGVPRGCDILIVYSPDAEEWCQYLQTLFLSSRQVRSQKILTHRLGPEASFSAEDLSLFLSTRCVVVLLSAELVQHFHKPALLPLLQRAFHPPHRVVRLLCGVRDSEEFLDFFPDWAHWQELTCDDEPETYVAAVKKAISEETASHNAAQAGLKLLSSSNPPDSASQSTWITDSGCDSVTDTEPEDEKVVSYSKQQNLPTVTSPGNLMVVQPDRIRCGTFHLGTFL

SEQ ID NO: 532 - DNA, 4668 bp, Homo Sapiens
acgcagcgagccagggatgtgagcggcgccccgcggcatggcagcctcaggggtgcccagaggatgcgacatcctcatcgtctacagcccggatgccgaggaatggtgccagtacctgcagaccctgttcctgtccagtcggcaggtccgcagccagaagatactgactcacaggctgggccccgaggcctccttctcggcagaggacctaagccttttcctcagcacccgctgtgtcgtggtgctgctgtccgcggagctggtgcagcacttccacaagcccgccttgctgcccctgctgcagagagctttccatcctccgcaccgcgtggtcaggctgctctgcggcgtgcgggacagcgaggagttcctagacttctttccagattgggcccattggcaggagctcacctgtgacgatgagccagagacctacgtggcagctgtgaaaaaagccatttccgaagagacagcgtctcataatgctgcccaggctggtctcaaactcctgagctcaagcaatcctcccgactcggcttcccaaagcacttggattacagattctggctgtgactcagtcactgacactgagcctgaggacgagaaggttgtttcctactcgaagcagcagaacctgccgacggtgacttcacctgggaacctgatggtggtgcagccggaccgcattcgctgtgggacctttcatctgggaacgtttctctgaagatatattctggagacttagtggtgtgtgaaaccgttatcagctattatactgacatggaagaaattgggaatttattgtccaatgccgcgaatcctgtggaattcatgtgtcaggcctttaaaattgtgccctacaacacagagacccttgataaactgctaaccgaatccctgaagaacaatatccctgcaagcggactgcacctctttggaatcaaccagctggaagaagaagatatgatgacaaatcagagggatgaagagctgcccaccctgttgcattttgctgcgaagtatggactgaagaacctcactgccttgttgctcacctgcccaggagccctgcaggcgtacagcgtggccaacaagcatggccactaccccaacaccatcgctgagaaacacggcttcagggacctgcggcagttcatcgacgagtatgtggaaacggtggacatgctcaagagtcacattaaagaggaactgatgcacggggaggaggctgatgctgtgtacgagtccatggcccacctttccacagacctgcttatgaaatgctcgctcaaccccggctgtgacgaggatctctatgagtccatggctgcctttgtcccagctgccactgaagacctctatgttgaaatgcttcaggccagtacatctaacccaatccctggagatggtttctctcgggccactaaggactctatgatccgcaagtttttagaaggcaacagcatgggaatgaccaatctggagagagatcagtgccatcttggtcaggaagaagatgtttatcacacggtggatgacgatgaggccttttctgtggacctggccagcaggccccctgtcccagtgcccagaccagagaccactgctcctggtgctcaccagctgcctgacaacgaaccatacatttttaaagtttttgcagaaaaaagtcaagagcggcctgggaatttctacgtttcctcagagagcatcaggaaagggccgcccgtcagaccatggagggacaggccccagtcgagtatatatgacccttttgcgggaatgaaaacgccaggccagcggcagcttatcaccctccaggagcaggtgaagctgggcattgtcaacgtggatgaggctgtgctccacttcaaagagtggcagctcaaccagaagaaacgatcggagtcctttcgtttccagcaggaaaatcttaaacggctaagagacagcatcacccgaagacagagagagaagcaaaaatcaggaaagcagacagacttggagatcacggtcccaattcggcactcacagcacctgcctgcaaaagtggagtttggagtctatgagagtggccccaggaaaagtgtcattccccctaggacggagctgagacgaggagactggaaaacagacagcacctccagcacagcaagtagcacaagtaaccgctccagcacccggagcctcctcagtgtgagcagcgggatggaaggggacaacgaggataatgaagtccctgaggttaccagaagtcgcagtccaggccccccacaagtggatgggacacccaccatgtccctcgagagaccccccagggtgcctccgagagctgcctcacagaggcctccgaccagggagaccttccatcctcctccacctgttccacccagaggacgctgattccacctcctaaaacctgcctacttcaggactttaagactcacagtcttcagcctgttaatgatgtcttcatgttgagttttatagcatgactgttgaccttaagatccattctcattgctgataatgctgcagccctgctggtttgggcttgcctcgaagattttattaaggcacgaagaagtgaaaaactaagggcttcattcaccatcaccaagtatatcgaaccatatacttgtttgccaaaaggatgaagacttaatcgaaatacttacctctaatttgccatatcagaagcctaaaaagaatgatcataaatgtacttcaccagtgattttactgaaatgcacttatattagtctttatgtatttgctagttcagcctgatttctagaagaggttatagtgtgagacttgtagtattcaagtaagataagtgacctaattttaaaataattcttctacttttctgtatattcagcagggtatttaagtgctagggctggtcacacacaaccaactgaaaaagactagagggattagtacaaactcctcttatacagaaggcaaatctgaggttccacagaagtctggaaccaagactattcagttggttaaataaagaggttagtctagactgggcctgctcattctaggtcaccacattttccatctccaaatagccaggccctctctccctcaagaaatgcccagatgtagaaattcatcagtgcctattggtcttccagaattttccatcttccgtatctcccaggcatgagactaccaagtttgtttgttttctttccaatttgggaatttatacttcagtatggtttcaacgcagttatgtttccagagaacatctagaagtggctggaaaccagaagctggggattccagggaccccacttagtgctctatttcctttataggttttatttctggtcatagagagagaaggacctttgactttttcttcgttgaggcttctgaggaggaaaaacaaacctaaaatagaaatacagtcagcctttcaaatccatgggttctgtgtccgtggattcaaccaaccttggatcaaaaatatttgaaaaaaaatctacaaagtttcaaaaagcaaaacttgaatttgctgcatgccaagaagtatgttgaattcatgtaaatgaagtgatgtgtaggcattgtattagatattataagaaatctagaaatgatttaaagcatacaggaggatgtgcataggttatatgcaaatactatgctattttatatatgggacttgagcatttgtggattttgatactgggggatcctggaaccaatcccccatggataccaaagtacgactgtagttatctattttttacatacttattattaccaccatgctcagtaagtccatttttgcatggaatatggagccttaaaacatgtcatgaatttggagtccctggcacataaatctaccttcaaatcagaggtccttaatgatgcctaaacatacagtaaaattagaatcagaaatacttctttaaaaaatattcaaaatgtgtttgtttcccatgggattattctctatcccacacgaatgtaaaaaaatccacattaatgatccatttaagtatagttttattgggtccttttctaatgattaaaggttctttctcaatttcattcctcagtcctgcaagtaaggactcatactgaagagtactgaaacaaggacttcttgtcagaaacagcttctggaatcttgggttttgtttttgttttttgacaaaatacactattggccatgtccatcacgagagtgtttgtagtaattaattaccttgtacaggacctggcacttagtagcattcttcaaatgttccctcagtgatccttttactctccttgtcacttatttgggagaaataggggcacgtgagataagaagaagaataattttgatgttggtatgcttgccctgttacttatagacagtctttgtcataggcaaacttgaatttgatttaaaatagggctgggaaaaatattcaataactgtaagcccccttttggatgccaaacttagaattttgtacattctctgatgaacaagcatttagatcgtaacatggtaaagcctattaccagccaatgttgttagcatctttgtatgcacatcactgtttgtgcaatatatgaatattttgttgcattgtattcttatataaaaataagtagaaaacataaaattgaaattgctgatgagaa

SEQ ID NO: 533 - protein, 239 aa, Homo Sapiens; identical to SEQ ID NO: 85

SEQ ID NO: 534 - DNA, 453 bp, Homo Sapiens
ctcgattctgcgggcgagatgcccctgggacacatcatgaggctggacctggagaaaattgccctggagtacatcgtgccctgtctgcacgaggcaatggtggcttgctatccgggaaatggaacaggttatgttcgccacgtggacaaccccaacggtgatggtcgctgcatcacctgcatctactatctgaacaagaattgggatgccaagctacatggtgggatcctgcggatatttccagaggggaaatcattcatagcagatgtggagcccatttttgacagactcctgttcttctggtcagatcgtaggaacccacacgaagtgcagccctcttacgcaaccagatatgctatgactgtctggtactttgatgctgaagaaagggcagaagccaaaaagaaattcaggaatttaactaggaaaactgaatctgccctcactgaagac

SEQ ID NO: 535 - DNA, 494 bp, Homo Sapiens
acctctacagttgtaaaaagtattagattctactatctgtgggttgtgcttgccagacaggtcttaaattgtatattttttggaaaagtttatatactctcttaggaatcattgtgaaaagatcaagaaatcaggatggccatttatttaatatccattcatttcatgttagtgggactattaacttgtcaccaagcaggactctatttcaaacaaaatttaaaactgtttgtggcctatatgtgtttaatcctggttaaagataaagcttcataatgctgtttttattcaacacattaaccagctgtaaaacacagacctttatcaagagtaggcaaagattttcaggattcatatacagatagactataaagtcatgtaatttgaaaagcagtgtttcattatgaaagagctctcaagttgcttgtaaagctaatctaattaaaaagatgtataaatgttgtcaaaaaaaaaaaaaaaaaaagaaaaaaagt

SEQ ID NO: 536 - DNA, 7616 bp, Homo Sapiens
ggcacgaggccgcttgcgggtgagctctgcccaagccgaggctgcggggcccgtgctccggcgaacgcccactcgagacgggttcggctccgacgccccgcggcgccggcgggaggactgcggtgccccgcggaggggctgagtttgccagccgcggccgccctcctgacgccacggggcgcctccccgactcaaacggtgggcccacttgaccctgtttcccacctcccgccccccaggtccggaggcgcccgggtgaactgggacaaagggtggagggcggggggtccaggcctccgcggggcccccggggcgactcgggggcggaccgcggggcggagctgccgcccccccgggggccccgctgagcccccgcctggcgccccgcctcgacggcggggtgagtccggccgagccacctgagcccgagccgcgggacaccgtcgctcccactcaggccggctcggtggactcgggctcggcgccctgtggcagcgaggtgctctccgaatgctgcgcaccgcgatgggcctgaggagctggctcgccgacgagaggcttacgacgcgtggcgctacccggactcctcgaccgagcggcccccatggggcgcgctgccgcctcggccaccgctgctgctgctcctgctgggggtaccccgcgcgacggcggagccggtggcgacgacgacgaggacgacctgctgctcctgctgcagccgccgcctccgacctgggcgctcagcccccggacgacgaggacgacgtcggcggcggaggctggacccgcgagtcgggggcgatcagcctgcctctgggctctgaagagcggccattcctcagattcgaagctagtcggacggagacccgagacttctcgccggtaaggagtctaagcttcctgaacacatctccaactacacagcccttctgctgagcagggatggcagggacttgtgtagaggttgatgtgtcgggaagacgactcgtccctaccgtccaccctgtacgtgggtgctcgagaggccctctttgcactcagtagcaaccttgggacatgcacccacgagctctccgggagaaacgtgagtcatcgttggacagcttcctgccaggcggggagtaccaggagctgctttggggtgcagacggtcgaaggacggtccgcccctcatggtcctcgacgaaaccccacgtctgccagagaagaaacagcagtgcagcttcaagggcaaggacccacagcgcgacgtctcttctttgtcgtcacgtcgaagttcccgttcctgggtgtcgcgctgtgtcaaaactacatcaagatcctcctgccgctcagcggcagtcacctgttacagttttgatgtagttctaggaggacggcgagtcgccgtcagtggacaacacctgtggcacagcagccttcagccccatgtgtacctacatcaacatgggtggacaccgtgtcgtcggaagtcggggtacacatggatgtagttgtaccagaacttcaccctggcaagggacgagaaggggaatgtcctcctggaagattcttgaagtgggaccgttccctgctcttccccttacaggaggaccttctaggcaagggccgttgtcccttcgacccgaatttcaagtccactgccctggtccgttcccggcaacagggaagctgggcttaaagttcaggtgacgggaccaggttgatggcgagctctacactggaacagtcagcagcttccaagggaatgccaactaccgctcgagatgtgaccttgtcagtcgtcgaaggttcccttacacccggccatctcgcggagccaaagccttcgccccaccaagaccgagagctgggccggtagagcgcctcggtttcggaagcggggtggttctggctctcgtccctcaactggctgcaagacccagcttttgtggcctcagcctacattccagggagttgaccgacgttctgggtcgaaaacaccggagtcggatgtaaggtgagagcctgggcagcttgcaaggcgatgatgacaagatctactttttctactctcggacccgtcgaacgttccgctactactgttctagatgaaaaagatcagcgagactggccaggaatttgagttctttgagaacaccattgtgtccagtcgctctgaccggtccttaaactcaagaaactcttgtggtaacacaggcgcattgcccgcatctgcaagggcgatgagggtggagagcgggtgctacagcgtaacgggcgtagacgttcccgctactcccacctctcgcccacgatgtgcagcgctggacctccttcctcaaggcccagctgctgtgctcacggcccgcgtcgcgacctggaggaaggagttccgggtcgacgacacgagtgccgggcacgatggcttccccttcaacgtgctgcaggatgtcttcacgctgagcccctgctaccgaaggggaagttgcacgacgtcctacagaagtgcgactcggggagcccccaggactggcgtgacacccttttctatggggtcttcacttcccatcgggggtcctgaccgcactgtgggaaaagataccccagaagtgaagggtgtggcacaggggaactacagaaggctctgccgtctgtgtcttcacaatgacaccgtgtccccttgatgtcttccgagacggcagacacagaagtgttactaggatgtgcagagagtcttcagcggcctctacaaggaggtgaaccgtgagtcctacacgtctctcagaagtcgccggagatgttcctccacttggcactcacacagcagtggtacaccgtgacccacccggtgcccacaccccggcctggtgtgtcgtcaccatgtggcactgggtgggccacgggtgtggggccggaccagcgtgcatcaccaacagtgcccgggaaaggaagatcaactcatccctgctcgcacgtagtggttgtcacgggccctttccttctagttgagtagggacgagctcccagaccgcgtgctgaacttcctcaaggaccacttcctgatggactcgagggtctggcgcacgacttgaaggagttcctggtgaaggactacctggggcaggtccgaagccgcatgctgctgctgcagccccaggctcgctaccacccgtccaggcttcggcgtacgacgacgacgtcggggtccgagcgatggtgcgcgtggctgtacaccgcgtccctggcctgcaccacacctacgatgtcccgcgcaccgacatgtggcgcagggaccggacgtggtgtggatgctacaggtcttcctgggcactggtgacggccggctccacaaggcagtgagcgtgggcagaaggacccgtgaccactgccggccgaggtgttccgtcactcgcacccgccccgggtgcacatcattgaggagctgcagatcttctcatcgggacagccggggcccacgtgtagtaactcctcgacgtctagaagagtagccctgtcggcgtgcagaatctgctcctggacacccacagggggctgctgtatgcggcctgcacgtcttagacgaggacctgtgggtgtcccccgacgacatacgccggacacactcgggcgtagtccaggtgcccatggccaactgcagcctgtaccgggtgtgagcccgcatcaggtccacgggtaccggttgacgtcggacatggccagctgtggggactgcctcctcgcccgggacccctactgtgcttggagcggtcgacacccctgacggaggagcgggccctggggatgacacgaacctcgccctccagctgtaagcacgtcagcctctaccagcctcagctggccaccaggcgaggtcgacattcgtgcagtcggagatggtcggagtcgaccggtggtccgcgtggatccaggacatcgagggagccagcgccaaggacctttgcagcgcggcacctaggtcctgtagctccctcggtcgcggttcctggaaacgtcgcgctcttcggttgtgtccccgtcttttgtaccaacaggggagaagccatgtgaagaagccaacacaggggcagaaaacatggttgtcccctcttcggtacactgcaagtccagttccagcccaacacagtgaacactttggcctgcccgctcccgttcaggtcaaggtcgggttgtgtcacttgtgaaaccggacgggcgaggtctccaacctggcgacccgactctggctacgcaacggggcccccgtcaatagaggttggaccgctgggctgagaccgatgcgttgccccgggggcagttagcctcggcctcctgccacgtgctacccactggggacctgctgctggtgggcggagccggaggacggtgcacgatgggtgacccctggacgacgaccaccccacccaacagctgggggagttccagtgctggtcactagaggagggcttccgtgggttgtcgaccccctcaaggtcacgaccagtgatctcctcccgaaggagcagctggtagccagctactgcccagaggtggtggaggacggggtggcatcgtcgaccatcggtcgatgacgggtctccaccacctcctgccccaccgtgaccaaacagatgagggtggcagtgtacccgtcattatcagcacatcgcgctggtttgtctactcccaccgtcacatgggcagtaatagtcgtgtagcgctgtgagtgcaccagctggtggcaaggccagctggggtgcagacaggtcctacactcacgtggtcgaccaccgttccggtcgaccccacgtctgtccaggaactggaaggagttcctggtgatgtgcacgctctttgtgctggccgtgctgtgaccttcctcaaggaccactacacgtgcgagaaacacgaccggcacgacctcccagttttattcttgctctaccggcaccggaacagcatgaaagtcttgagggtcaaaataagaacgagatggccgtggccttgtcgtactttcagaacctgaagcagggggaatgtgccagcgtgcaccccaagacctgccctgtggggacttcgtcccccttacacggtcgcacgtggggttctggacgggacacctgctgccccctgagacccgcccactcaacggcctagggccccctagcaccacgacgggggactctgggcgggtgagttgccggatcccgggggatcgtggccactcgatcaccgagggtaccagtccctgtcagacagccccccgggggcggtgagctagtggctcccatggtcagggacagtctgtcggggggcccccgccgagtcttcactgagtcagagaagaggccactcagcatccaagacagctggctcagaagtgactcagtctcttctccggtgagtcgtaggttctgtcgatcgtggaggtatccccagtgtgcccccggccccgggtccgccttggctcgagcacctccataggggtcacacgggggccggggcccaggcggaaccgagcgagatccgtgactctgtggtgtgagagctgacttccagaggacgctgcccctctaggcactgagacaccacactctcgactgaaggtctcctgcgacgggtggcttcaggggctgtgaatgctcggagagggtcaactggacctcccctcaccgaagtccccgacacttacgagcctctcccagttgacctggaggggagcgctctgctcttcgtggaacacgaccgtggtgcccggcccttgggagcctgcgagacgagaagcaccttgtgctggcaccacgggccgggaaccctcggatggagccagctggcctgctgctctccagtcaagtagcgaagctcctaccaacctcggtcgaccggacgacgagaggtcagttcatcgcttcgaggatggtcccagacacccaaacagccgtggccccagaggtcctggccaaatatgggggggtctgtgggtttgtcggcaccggggtctccaggaccggtttataccccgcctgcctaggttggtggaacagtgctccttatgtaaactgagccctttgcggacggatccaaccaccttgtcacgaggaatacatttgactcgggaaactttagaaaacaattccaaatgtgaaactagaatgagagggaagagatagcaaatcttttgttaaggtttacactttgatcttactctcccttctctatcgatggcatgcagcacacacggctgctccagttcatggcctcccaggggtgctaccgtacgtcgtgtgtgccgacgaggtcaagtaccggagggtccccacgtggggatgcatccaaagtggttgtctgagacagagttggaaaccctcaccacccctacgtaggtttcaccaacagactctgtctcaacctttgggagtggaactggcctcttcaccttccacattatcccgctgccaccggctgccctgtttgaccggagaagtggaaggtgtaatagggcgacggtggccgacgggacactcactgcagattcaggaccagcttgggctgcgtgcgttctgccttgccagagtgacgtctaagtcctggtcgaacccgacgcacgcaagacggaacggtgtcagccgaggatgtagttgttgctgccgtcgtcccaccacctcagggaccagtcggctcctacatcaacaacgacggcagcagggtggtggagtccctgcagagggctaggttggcactgcggccctcaccaggtcctgggctcggaccgtctcccgatccaaccgtgacgccgggagtggtccaggacccgagcctggcaactcctggacctttccagcctgtatcaggctgtggccacacgagaggagttgaggacctggaaaggtcggacatagtccgacaccggtgtgctctcctcagcgcgagctcaggagagatttcgtgacaatgtacgcctttccctcagagtcgcgctcgagtcctctctaaagcactgttacatgcggaaagggagtctattcagggaagagactgtcgcctgccttcctccgttgttgcgtgagaacctaagtcccttctctgacagcggacggaaggaggcaacaacgcactcttggcgtgtgccccttcccaccatatccaccctcgctccatctttgaactcaaagcacacggggaagggtggtataggtgggagcgaggtagaaacttgagtttcacgaggaactaactgcaccctggtcctctccccagtccccagttcacccgtgctccttgattgacgtgggaccaggagaggggtcaggggtcaagtgggtccatccctcaccttcctccactctaagggatatcaacactgcccagcacaggtagggagtggaaggaggtgagattccctatagttgtgacgggtcgtgaggggccctgaatttatgtggtttttatatattttttaataagatgcacttccccgggacttaaatacaccaaaaatatataaaaaattattctacgtgattatgtcattttttaataaagtctgaagaattactgtttaaaaaaaaaaaaatacagtaaaaaattatttcagacttcttaatgacaaatttttttttttaaaaaaactttttttg

SEQ ID NO: 537 - protein, 355 aa, Rat
MTLRSRRGFLSFLPGLRPPRRWLRISKRGPPTSHWASPALGGRTLHYSCRSQSGTPFSSEFQATFPAFAAKVARGPWLPQVVEPPARLSASPLCVRSGQALGACTLGVPRLGSVSEMPLGHIMRLDLEKIALEYIVPCLHEVGFCYLDNFLGEVVGDCVLERVKQLHYNGALRDGQLAGPRAGVSKRHLRGDQITWIGGNEEGCEAINFLLSLIDRLVLYCGSRLGKYYVKERSKAMVACYPGNGTGYVRHVDNPNGDGRCITCIYYLNKNWDAKLHGGVLRIFPEGKSFVADVEPIFDRLLFSWSDRRNPHEVQPSYATRYAMTVWYFDAEERAEAKKKFRNLTRKTESALAKD

SEQ ID NO: 538 - RNA, 21 nt, Homo Sapiens
ucugcuggccuuguucauuuu

SEQ ID NO: 539 - RNA, 21 nt, Homo Sapiens
aaugaacaaggccagcagauu

SEQ ID NO: 540 - DNA, 25 bp, Homo Sapiens
tcacccacactgtgcccatctacga

SEQ ID NO: 541 - DNA, 26 bp, Homo Sapiens
cagcggaaccgctcattgccaaatgg

SEQ ID NO: 542 - DNA, 21 bp, Artificial Sequence
  Primer
gttttcccagtcacgacgttg

SEQ ID NO: 543 - DNA, 24 bp, Artificial Sequence
  Primer
tgagcggataacaatttcacacag

SEQ ID NO: 544 - DNA, 24 bp, Artificial Sequence
  Primer
gcccttagtttttcacttcttcgt

SEQ ID NO: 545 - DNA, 26 bp, Artificial Sequence
  Primer
ccttaagatccattctcattgctgat

SEQ ID NO: 546 - DNA, 19 bp, Artificial Sequence
  Primer
gccctgaggcactcttcca

SEQ ID NO: 547 - DNA, 18 bp, Artificial Sequence
  Primer
gcggatgtccacgtcaca

SEQ ID NO: 548 - DNA, 20 bp, Artificial Sequence
  Primer
tcatcgacaggctggtcctc

SEQ ID NO: 549 - DNA, 20 bp, Artificial Sequence
  Primer
gttccatttcccggatagaa
